(19) United States
(12) Patent Application Publication
(10) Pub. No.: US 2017/0107577 A1
(43) Pub. Date: Apr. 20, 2017

(54) Determining Cancer Aggressiveness, Prognosis and Responsiveness to Treatment

(71) Applicant: THE COUNCIL OF THE QUEENSLAND INSTITUTE OF MEDICAL RESEARCH, Herston, Queensland (AT)

(72) Inventor: Fares Al-Ejeh, Herston, Queensland (AU)

(21) Appl. No.: 15/125,515

(22) PCT Filed: Mar. 11, 2015
(86) PCT No.: PCT/AU2015/050096

§ 371 Date: Sep. 12, 2016

(30) Foreign Application Priority Data
Mar. 11, 2014 (AU) 2014900813
Apr. 3, 2014 (AU) 2014901212
Nov. 21, 2014 (AU) 2014904716

(51) Int. Cl. C12Q 1/68; C07K 16/28; G01N 33/574

(52) U.S. Cl. CPC C12Q 1/6886; G01N 33/57415; C07K 16/2887; C07K 16/2818; C12Q 2600/158; C12Q 2600/118; C07K 2317/24

(57) ABSTRACT

The invention provides methods of determining the aggressiveness, prognosis and response to therapy for particular cancers, which include comparing the expression levels of one or a plurality of differentially expressed genes from one or more 5 functional metagenes, including a Carbohydrate/Lipid Metabolism metagene, a Cell Signalling metagene, a Cellular Development metagene, a Cellular Growth metagene, a Chromosome Segregation metagene, a DNA Replication/Recombination metagene, an Immune system metagene, a Metabolic Disease metagene, a Nucleic Acid Metabolism metagene, a Post-Translational Modification metagene, a Protein 10 Synthesis/Modification metagene and a Multiple Networks metagene. The method disclosed herein may be particularly suitable as a companion diagnostic for cancer therapies.

### FIELD

[0001] THIS INVENTION relates to cancer. More particularly, this invention relates to methods of determining the aggressiveness of cancers, prognosis of cancers and/or predicting responsiveness to anti-cancer therapy.

### BACKGROUND

[0002] Hormone receptors (ER and PR) and HER2 are standard biomarkers used in clinical practice to aid the histopathological classification of breast cancer and management decisions. Hormone receptor (HR)− and HER2− positive tumors benefit from tamoxifen and anti-HER2 therapies, respectively. On the other hand, there are currently no targeted drug therapies for management of triple negative breast cancer (TNBC), which lacks expression of HR/HER2. TNBCs are more sensitive to chemotherapy than HR-positive tumors because they are generally more proliferative, and pathological complete responses (pCR) after chemotherapy are more likely in TNBC than in non-TNBC^{1,2}. Paradoxically, TNBC is associated with poorer survival than non-TNBC, due to more frequent relapse in TNBC patients with residual disease^{1,2}. Only 31% of TNBC patients experience pCR after chemotherapy³, emphasizing the need for targeted therapies.

[0003] Transcriptome profiling has been used to dissect the heterogeneity of breast cancer into five intrinsic ‘PAM50’ subtypes; Luminal A, Luminal B, Basal-like, HER-2 and normal-like subtypes that relate to clinical outcomes⁴⁻⁸. Several gene signatures have been developed to predict outcome or response to treatment including: MammaPrint⁹, OncotypeDx^{10,11}, Theros¹²⁻¹⁵. These commercial signatures rely on models that select genes based on clinical phenotypes such as tumor response or survival time. Notwithstanding their clinical utilities, these models fail to identify core biological mechanisms for the phenotypes of interest. Recently, an approach based on biological function-driven gene coexpression signatures, “attractor metagenes”, has been applied to the prediction of survival in certain cancers. However such approaches are at an early stage and much work needs to be done to develop this attractor metagene analysis in relation to cancers in general and also for specific cancers.

### SUMMARY

[0004] The present invention relates to the comparison of expression levels of a plurality of differentially expressed genes from one or a plurality of functional metagenes, including a Carbohydrate/Lipid Metabolism metagene, a Cell Signalling metagene, a Cellular Development metagene, a Cellular Growth metagene, a Chromosome Segregation metagene, a DNA Replication/Recombination metagene, an Immune system metagene, a Metabolic Disease metagene, a Nucleic Acid Metabolism metagene, a Post-Translational Modification metagene, a Protein Synthesis/Modification metagene and a Multiple Networks metagene; wherein the comparison of expression level of a plurality of genes in these metagenes is used to facilitate determining the aggressiveness of certain cancers. This comparison may also, or alternatively, assist in providing a cancer prognosis for a patient. The invention also relates to predicting the responsiveness of a cancer to an anti-cancer treatment by determining an expression level of one or a plurality of genes associated with one or a plurality of the aforementioned twelve functional metagenes.

[0005] The invention further relates to the comparison of expression levels of a specific signature of differentially expressed proteins to facilitate or assist in determining the aggressiveness of a particular cancer, a prognosis for a cancer patient and/or predicting responsiveness to an anti-cancer treatment. One or both of these comparisons may also be integrated with the aforementioned comparison of the expression levels of the plurality genes from one or a plurality of the aforementioned functional metagenes in determining cancer aggressiveness, prognosis and/or treatment.

[0006] In a first aspect, the invention relates to a method of determining the aggressiveness of a cancer in a mammal, said method including the step of comparing an expression level of one or a plurality of overexpressed genes and/or an expression level of one or a plurality of underexpressed genes in one or a plurality of cancer cells, tissues or organs of the mammal, wherein the overexpressed genes and the underexpressed genes are from one or a plurality of metagenes selected from the group consisting of a Carbohydrate/Lipid Metabolism metagene, a Cell Signalling metagene, a Cellular Development metagene, a Cellular Growth metagene, a Chromosome Segregation metagene, a DNA Replication/Recombination metagene, an Immune System metagene, a Metabolic Disease metagene, a Nucleic Acid Metabolism metagene, a Post-Translational Modification metagene, a Protein Synthesis/Modification metagene and a Multiple Networks metagene, wherein: a higher relative expression level of the one or plurality of overexpressed genes compared to the one or plurality of underexpressed genes indicates or correlates with higher aggressiveness of the cancer; and/or a lower relative expression level of the one or plurality of overexpressed genes compared to the one or plurality of underexpressed genes indicates or correlates with lower aggressiveness of the cancer compared to a mammal having a higher expression level.

[0007] In a second aspect, the invention relates to a method of determining a cancer prognosis for a mammal, said method including the step of comparing an expression level of one or a plurality of overexpressed genes and/or an expression level of one or a plurality of underexpressed genes in one or a plurality of cancer cells, tissues or organs of the mammal, wherein the overexpressed genes and the underexpressed genes are from one or a plurality of metagenes selected from the group consisting of a Carbohydrate/Lipid Metabolism metagene, a Cell Signalling metagene, a Cellular Development metagene, a Cellular Growth metagene, a Chromosome Segregation metagene, a DNA Replication/Recombination metagene, an Immune System metagene, a Metabolic Disease metagene, a Nucleic Acid Metabolism metagene, a Post-Translational Modification metagene, a Protein Synthesis/Modification metagene and a Multiple Networks metagene, wherein: a higher relative expression level of the one or plurality of overexpressed genes compared to the one or plurality of underexpressed genes indicates or correlates with a less favourable cancer prognosis; and/or a lower relative expression level of the one or plurality of overexpressed genes compared to the one or plurality of underexpressed genes indicates or correlates with a more favourable cancer prognosis.

[0008] In one embodiment of the above aspects, the one or plurality of overexpressed genes and/or the one or plurality of underexpressed genes are selected from one of the aforesaid metagenes. In an alternative embodiment, the one or plurality of overexpressed genes and/or one or the plurality of underexpressed genes are selected from a plurality of the aforesaid metagenes.

[0009] Suitably, for the method of the above aspects the Carbohydrate/Lipid Metabolism metagene, the Cell Signalling metagene, the Cellular Development metagene, the Cellular Growth metagene, the Chromosome Segregation metagene, the DNA Replication/Recombination metagene, the Immune System metagene, the Metabolic Disease metagene, the Nucleic Acid Metabolism metagene, the Post-Translational Modification metagene, the Protein Synthesis/Modification metagene and/or the Multiple Networks metagene comprise one or a plurality of genes listed in Table 21.

[0010] In a third aspect, the invention relates to a method of determining the aggressiveness of a cancer in a mammal, said method including the step of comparing an expression level of one or a plurality of overexpressed genes and/or an expression level of one or a plurality of underexpressed genes in one or a plurality of cancer cells, tissues or organs of the mammal, wherein the overexpressed genes and the underexpressed genes are from one or a plurality of metagenes selected from the group consisting of a Metabolism metagene, a Signalling metagene, a Development and Growth metagene, a Chromosome Segregation/Replication metagene, an Immune Response metagene and a Protein Synthesis/Modification metagene, wherein: a higher relative expression level of the one or plurality of overexpressed genes compared to the one or plurality of underexpressed genes indicates or correlates with higher aggressiveness of the cancer; and/or a lower relative expression level of the one or plurality of overexpressed genes compared to the one or plurality of underexpressed genes indicates or correlates with lower aggressiveness of the cancer compared to a mammal having a higher expression level

[0011] In a fourth aspect, the invention relates to a method of determining a cancer prognosis for a mammal, said method including the step of comparing an expression level of one or a plurality of overexpressed genes and/or an expression level of one or a plurality of underexpressed genes in one or a plurality of cancer cells, tissues or organs of the mammal, wherein the overexpressed genes and the underexpressed genes are from one or a plurality of metagenes selected from the group consisting of a Metabolism metagene, a Signalling metagene, a Development and Growth metagene, a Chromosome Segregation/Replication metagene, an Immune Response metagene and a Protein Synthesis/Modification metagene, wherein: a higher relative expression level of the one or plurality of overexpressed genes compared to the one or plurality of underexpressed genes indicates or correlates with a less favourable cancer prognosis; and/or a lower relative expression level of the one or plurality of overexpressed genes compared to the one or plurality of underexpressed genes indicates or correlates with a more favourable cancer prognosis.

[0012] In one embodiment of the third and fourth aspects, the one or plurality of overexpressed genes and/or the one or plurality of underexpressed genes are selected from one of the aforesaid metagenes. In an alternative embodiment, the one or plurality of overexpressed genes and/or the one or plurality of underexpressed genes are selected from a plurality of the aforesaid metagenes.

[0013] Suitably, the Metabolism metagene, the Signalling metagene, the Development and Growth metagene, the Chromosome Segregation/Replication metagene, the Immune Response metagene and/or the Protein Synthesis/Modification metagene comprise one or a plurality of genes listed in Table 22.

[0014] In particular embodiments of the method of the third and fourth aspects, the one or plurality of overexpressed genes and/or the one or plurality of underexpressed genes are from one or a plurality of a Carbohydrate/Lipid Metabolism metagene, a Cell Signalling metagene, a Cellular Development metagene, a Cellular Growth metagene, a Chromosome Segregation metagene, a DNA Replication/Recombination metagene, an Immune System metagene, a Metabolic Disease metagene, a Nucleic Acid Metabolism metagene, a Post-Translational Modification metagene, a Protein Synthesis/Modification metagene and a Multiple Networks metagene.

[0015] In a fifth aspect, the invention relates to a method of determining the aggressiveness of a cancer in a mammal, said method including the step of comparing an expression level of one or a plurality of overexpressed genes associated with chromosomal instability and/or an expression level of one or a plurality of underexpressed genes associated with estrogen receptor signalling in one or a plurality of cancer cells, tissues or organs of the mammal, wherein: a higher relative expression level of the one or plurality of overexpressed genes associated with chromosomal instability compared to the one or plurality of underexpressed genes associated with estrogen receptor signalling indicates or correlates with higher aggressiveness of the cancer; and/or a lower relative expression level expression level of the one or plurality of overexpressed genes associated with chromosomal instability compared to the one or plurality of underexpressed genes associated with estrogen receptor signalling indicates or correlates with lower aggressiveness of the cancer compared to a mammal having a higher expression level.

[0016] In a sixth aspect, the invention relates to a method of determining a cancer prognosis for a mammal, said method including the step of comparing an expression level of one or a plurality of overexpressed genes associated with chromosomal instability and/or an expression level of one or a plurality of underexpressed genes associated with estrogen receptor signalling in one or a plurality of cancer cells, tissues or organs of the mammal, wherein: a higher relative expression level of the one or plurality of overexpressed genes associated with chromosomal instability compared to the one or plurality of underexpressed genes associated with estrogen receptor signalling indicates or correlates with a less favourable cancer prognosis; and/or a lower relative expression level of the one or plurality of overexpressed genes associated with chromosomal instability compared to the one or plurality of underexpressed genes associated with estrogen receptor signalling indicates or correlates with a more favourable cancer prognosis.

[0017] In certain embodiments, the genes associated with chromosomal instability are of a CIN metagene. Non-limiting examples include genes selected from the group consisting of ATP6V1C1, RAP2A, CALM1, COG8, HELLS, KDM5A, PGK1, PLCH1, CEP55, RFC4, TAF2, SF3B3, GP1, PIR, MCM10, MELK, FOXM1, KIF2C, NUP155, TPX2, TTK, CENPA, CENPN, EXO1, MAPRE1, ACOT7, NAE1, SHMT2, TCP1, TXNRD1, ADM, CHAF1A and SYNCRIP. Preferably, the genes are selected from the group consisting of: MELK, MCM10, CENPA, EXO1, TTK and KIF2C.

[0018] In certain embodiments, the genes associated with estrogen receptor signalling are of an ER metagene. Non-limiting examples include genes selected from the group consisting of: BTG2, PIK3IP1, SEC14L2, FLNB, ACSF2, APOM, BIN3, GLTSCR2, ZMYND10, ABAT, BCAT2, SCUBE2, RUNX1, LRRC48, MYBPC1, BCL2, CHPT1, ITM2A, LRIG1, MAPT, PRKCB, RERE, ABHD14A, FLT3, TNN, STC2, BATF, CD1E, CFB, EVL, FBXW4, ABCB1, ACAA1, CHAD, PDCD4, RPL10, RPS28, RPS4X, RPS6, SORBS1, RPL22 and RPS4XP3. Preferably, the genes are selected from the group consisting of: MAPT and MYB.

[0019] In certain embodiments, the method of the fifth and sixth aspects further including the step of comparing an expression level of one or a plurality of other overexpressed genes selected from the group consisting of CAMSAP1, CETN3, GRHPR, ZNF593, CA9, CFDP1, VPS28, ADORA2B, GSK3B, LAMA4, MAP2K5, HCFC1R1, KCNG1, BCAP31, ULBP2, CARHSP1, PML, CD36, CD55, GEMIN4, TXN, ABHD5, EIF3K, EIF4B, EXOSC7, GNB2L1, LAMA3, NDUFC1 and STAU1, and/or an expression level of one or a plurality of other underexpressed genes selected from the group consisting of BRD8, BTN2A2. KIR2DL4. ME1, PSEN2, CALR, CAMK4, ITM2C, NOP2, NSUN5, SF3B1, ZNRD1-AS1, ARNT2, ERC2, SLC11A1, BRD4, APOBEC3A, CD1A, CD1B, CD1C, CXCR4, HLA-B, IGH, KIR2DL3, SMPDL3B, MYB, RLN1, MTMR7, SORBS1 and SRPK3, in one or a plurality of cancer cells, tissues or organs of the mammal, wherein: a higher relative expression level of the other overexpressed genes compared to the other underexpressed genes indicates or correlates with higher aggressiveness of the cancer and/or a less favourable cancer prognosis; and/or a lower relative expression level of the other overexpressed genes compared to the other underexpressed genes indicates or correlates with lower aggressiveness of the cancer and/or a more favourable cancer prognosis compared to a mammal having a higher expression level.

[0020] In one embodiment, the one or plurality of other overexpressed genes are selected from the group consisting of ABHD5, ADORA2B, BCAP31, CA9, CAMSAP1, CARHSP1, CD55, CETN3, EIF3K, EXOSC7, GNB2L1, GRHPR, GSK3B, HCFC1R1, KCNG1, MAP2K5, NDUFC1, PML, STAU1, TXN and ZNF593.

[0021] In one embodiment, the one or plurality of other underexpressed genes are selected from the group consisting of BTN2A2, ERC2, IGH, ME1, MTMR7, SMPDL3B and ZNRD1-AS1.

[0022] Suitably, the comparison of the expression level of the overexpressed genes associated with chromosomal instability and/or the expression level of the underexpressed genes associated with estrogen receptor signalling is integrated with the comparison of the expression level of the one or plurality of other overexpressed genes and/or the expression level of the one or plurality of other underexpressed genes to derive a first integrated score.

[0023] In a seventh aspect, the invention provides a method of determining the aggressiveness of a cancer in a mammal, said method including the step of comparing an expression level of one or a plurality of overexpressed genes selected from the group consisting of CAMSAP1, CETN3, GRHPR, ZNF593, CA9, CFDP1, VPS28, ADORA2B, GSK3B, LAMA4, MAP2K5, HCFC1R1, KCNG1, BCAP31, ULBP2, CARHSP1, PML, CD36, CD55, GEMIN4, TXN, ABHD5, EIF3K, EIF4B, EXOSC7, GNB2L1, LAMA3, NDUFC1 and STAU1, and/or an expression level of one or a plurality of underexpressed genes selected from the group consisting of BRD8, BTN2A2. KIR2DL4. ME1, PSEN2, CALR, CAMK4, ITM2C, NOP2, NSUN5, SF3B1, ZNRD1-AS1, ARNT2, ERC2, SLC11A1, BRD4, APOBEC3A, CD1A, CD1B, CD1C, CXCR4, HLA-B, IGH, KIR2DL3, SMPDL3B, MYB, RLN1, MTMR7, SORBS1 and SRPK3, in one or a plurality of cancer cells, tissues or organs of the mammal, wherein: a higher relative expression level of the one or plurality of overexpressed genes compared to the one or plurality of underexpressed genes indicates or correlates with higher aggressiveness of the cancer; and/or a lower relative expression level of the one or plurality of overexpressed genes compared to the one or plurality of underexpressed genes indicates or correlates with lower aggressiveness of the cancer compared to a mammal having a higher expression level.

[0024] In an eighth aspect, the invention provides a method of determining a cancer prognosis for a mammal, said method including the step of comparing an expression level of one or a plurality of overexpressed genes selected from the group consisting of CAMSAP1, CETN3, GRHPR, ZNF593, CA9, CFDP1, VPS28, ADORA2B, GSK3B, LAMA4, MAP2K5, HCFC1R1, KCNG1, BCAP31, ULBP2, CARHSP1, PML, CD36, CD55, GEMIN4, TXN, ABHD5, EIF3K, EIF4B, EXOSC7, GNB2L1, LAMA3, NDUFC1 and STAU1, and/or an expression level of one or a plurality of underexpressed genes selected from the group consisting of BRD8, BTN2A2. KIR2DL4. ME1, PSEN2, CALR, CAMK4, ITM2C, NOP2, NSUN5, SF3B1, ZNRD1-AS1, ARNT2, ERC2, SLC11A1, BRD4, APOBEC3A, CD1A, CD1B, CD1C, CXCR4, HLA-B, IGH, KIR2DL3, SMPDL3B, MYB, RLN1, MTMR7, SORBS1 and SRPK3, in one or a plurality of cancer cells, tissues or organs of the mammal, wherein: a higher relative expression level of the one or plurality of overexpressed genes compared to the one or plurality of underexpressed genes indicates or correlates with a less favourable cancer prognosis; and/or a lower relative expression level of the one or plurality of overexpressed genes compared to the one or plurality of underexpressed genes indicates or correlates with a more favourable cancer prognosis compared to a mammal having a higher expression level.

[0025] In one embodiment of the seventh and eighth aspects, the one or plurality of overexpressed genes are selected from the group consisting of ABHD5, ADORA2B, BCAP31, CA9, CAMSAP1, CARHSP1, CD55, CETN3, EIF3K, EXOSC7, GNB2L1, GRHPR, GSK3B, HCFC1R1, KCNG1, MAP2K5, NDUFC1, PML, STAU1, TXN and ZNF593.

[0026] In one embodiment of the seventh and eighth aspects, the one or plurality of underexpressed genes are selected from the group consisting of BTN2A2, ERC2, IGH, ME1, MTMR7, SMPDL3B and ZNRD1-AS1.

[0027] In particular embodiments, the method of the first, second, third, fourth, fifth, sixth, seventh and eighth aspects further includes the step of comparing an expression level of one or a plurality of overexpressed proteins selected from the group consisting of DVL3, PAI-1, VEGFR2, INPP4B, EIF4EBP1, EGFR, Ku80, HER3, SMAD1, GATA3, ITGA2, AKT1, NFKB1, HER2, ASNS and COL6A1, and/or an expression level of one or a plurality of underexpressed proteins selected from the group consisting of VEGFR2, HER3, ASNS, MAPK9, ESR1, YWHAE, RAD50, PGR, COL6A1, PEA15 and RPS6, in one or a plurality of cancer cells, tissues or organs of the mammal, wherein: a higher relative expression level of the overexpressed proteins compared to the underexpressed proteins indicates or correlates with higher aggressiveness of the cancer and/or a less favourable cancer prognosis; and/or a lower relative expression level of the overexpressed proteins compared to the underexpressed proteins indicates or correlates with lower aggressiveness of the cancer and/or a more favourable cancer prognosis compared to a mammal having a higher expression level.

[0028] Suitably, the comparison of the expression level of the one or plurality of overexpressed proteins and/or the expression level of the one or plurality of underexpressed proteins is to thereby derive an integrated score. In one particular embodiment, the comparison of the expression level of the one or plurality of overexpressed proteins and/or the expression level of the one or plurality of underexpressed proteins is integrated with:
[0029] the comparison of the expression level of the overexpressed genes associated with chromosomal instability and/or the expression level of the underexpressed genes associated with estrogen receptor signalling to derive a second integrated score; or
[0030] (ii) the first integrated score to derive a third integrated score; or
[0031] (iii) the comparison of the expression level of the overexpressed genes selected from the group consisting of CAMSAP1, CETN3, GRHPR, ZNF593, CA9, CFDP1, VPS28, ADORA2B, GSK3B, LAMA4, MAP2K5, HCFC1R1, KCNG1, BCAP31, ULBP2, CARHSP1, PML, CD36, CD55, GEMIN4, TXN, ABHD5, EIF3K, EIF4B, EXOSC7, GNB2L1, LAMA3, NDUFC1 and STAU1 and/or the expression level of the underexpressed genes selected from the group consisting of BRD8, BTN2A2. KIR2DL4. ME1, PSEN2, CALR, CAMK4, ITM2C, NOP2, NSUN5, SF3B1, ZNRD1-AS1, ARNT2, ERC2, SLC11A1, BRD4, APOBEC3A, CD1A, CD1B, CD1C, CXCR4, HLA-B, IGH, KIR2DL3, SMPDL3B, MYB, RLN1, MTMR7, SORBS1 and SRPK3 to derive a fourth integrated score; or
[0032] (iv) the comparison of the expression level of the overexpressed genes and/or an expression level of the underexpressed genes, wherein the genes are from one or a plurality of the Carbohydrate/Lipid Metabolism metagene, the Cell Signalling metagene, the Cellular Development metagene, the Cellular Growth metagene, the Chromosome Segregation metagene, the DNA Replication/Recombination metagene, the Immune System metagene, the Metabolic Disease metagene, the Nucleic Acid Metabolism metagene, the Post-Translational Modification metagene, the Protein Synthesis/Modification metagene and/or the Multiple Networks metagene, to derive a fifth integrated score; or
[0033] (v) the comparison of the expression level of the overexpressed genes and/or the expression level of the underexpressed genes, wherein the genes are from one or a plurality of the Metabolism metagene, the Signalling metagene, the Development and Growth metagene, the Chromosome Segregation/Replication metagene, the Immune Response metagene and/or the Protein Synthesis/Modification metagene, to derive a sixth integrated score.
[0034] wherein the second, third, fourth, fifth and/or sixth integrated score is indicative of, or correlates with, the aggressiveness and/or prognosis of the cancer in the mammal.

[0035] In particular embodiments, the second, third, fourth, fifth and/or sixth integrated score are derived, at least in part, by addition, subtraction, multiplication, division and/or exponentiation.

[0036] In a preferred embodiment, the first, second and/or third integrated scores are derived, at least in part, by exponentiation wherein the comparison of the expression level of the other overexpressed genes and the expression level of the other underexpressed genes is raised to the power of
[0037] (i) the comparison of the expression level of the overexpressed genes associated with chromosomal instability and/or the expression level of the underexpressed genes associated with estrogen receptor signalling; and/or
[0038] (ii) the comparison of the expression level of the overexpressed proteins and/or the expression level of the underexpressed proteins.

[0039] In a ninth aspect, the invention provides a method of determining the aggressiveness of a cancer in a mammal, said method including the step of comparing an expression level of one or a plurality of overexpressed proteins selected from the group consisting of DVL3, PAI-1, VEGFR2, INPP4B, EIF4EBP1, EGFR, Ku80, HER3, SMAD1, GATA3, ITGA2, AKT1, NFKB1, HER2, ASNS and COL6A1, and/or an expression level of one or a plurality of underexpressed proteins selected from the group consisting of VEGFR2, HER3, ASNS, MAPK9, ESR1, YWHAE, RAD50, PGR, COL6A1, PEA15 and RPS6, in one or a plurality of cancer cells, tissues or organs of the mammal, wherein: a higher relative expression level of the one or plurality of overexpressed proteins compared to the one or plurality of underexpressed proteins indicates or correlates with higher aggressiveness of the cancer; and/or a lower relative expression level of the one or plurality of overexpressed proteins compared to the one or plurality of underexpressed proteins indicates or correlates with lower aggressiveness of the cancer compared to a mammal having a higher expression level.

[0040] In a tenth aspect, the invention provides a method of determining a cancer prognosis for a mammal, said method including the step of comparing an expression level of one or a plurality of overexpressed proteins selected from the group consisting of DVL3, PAI-1, VEGFR2, INPP4B, EIF4EBP1, EGFR, Ku80, HER3, SMAD1, GATA3, ITGA2, AKT1, NFKB1, HER2, ASNS and COL6A1, and/or an expression level of one or a plurality of underexpressed proteins selected from the group consisting of VEGFR2, HER3, ASNS, MAPK9, ESR1, YWHAE, RAD50, PGR, COL6A1, PEA15 and RPS6, in one or a plurality of cancer cells, tissues or organs of the mammal, wherein: a higher relative expression level of the one or plurality of overexpressed proteins compared to the one or plurality of underexpressed proteins indicates or correlates with a less favourable cancer prognosis; and/or a lower relative expression level of the one or plurality of overexpressed proteins compared to the one or plurality of underexpressed proteins indicates or correlates with a more favourable cancer prognosis compared to a mammal having a higher expression level.

[0041] In an eleventh aspect, the invention provides method of predicting the responsiveness of a cancer to an anti-cancer treatment in a mammal, said method including the step of comparing an expression level of one or a plurality of overexpressed genes and/or an expression level of one or a plurality of underexpressed genes in one or a plurality of cancer cells, tissues or organs of the mammal, wherein the overexpressed genes and the underexpressed genes are from one or a plurality of metagenes selected from the group consisting of a Carbohydrate/Lipid Metabolism metagene, a Cell Signalling metagene, a Cellular Development metagene, a Cellular Growth metagene, a Chromosome Segregation metagene, a DNA Replication/Recombination metagene, an Immune System metagene, a Metabolic Disease metagene, a Nucleic Acid Metabolism metagene, a Post-Translational Modification metagene, a Protein Synthesis/Modification metagene and a Multiple Networks metagene, wherein an altered or modulated relative expression level of the overexpressed genes compared to the underexpressed genes indicates or correlates with relatively increased or decreased responsiveness of the cancer to the anti-cancer treatment.

[0042] Suitably, for the present aspect the Carbohydrate/Lipid Metabolism metagene, the Cell Signalling metagene, the Cellular Development metagene, the Cellular Growth metagene, the Chromosome Segregation metagene, the DNA Replication/Recombination metagene, the Immune System metagene, the Metabolic Disease metagene, the Nucleic Acid Metabolism metagene, the Post-Translational Modification metagene, the Protein Synthesis/Modification metagene and/or the Multiple Networks metagene comprise one or a plurality of genes listed in Table 21.

[0043] In a twelfth aspect, the invention provides a method of predicting the responsiveness of a cancer to an anti-cancer treatment in a mammal, said method including the step of comparing an expression level of one or a plurality of overexpressed genes and/or an expression level of one or a plurality of underexpressed genes in one or a plurality of cancer cells, tissues or organs of the mammal, wherein the overexpressed genes and the underexpressed genes are from one or a plurality of metagenes selected from the group consisting of a Metabolism metagene, a Signalling metagene, a Development and Growth metagene, a Chromosome Segregation/Replication metagene, an Immune Response metagene and a Protein Synthesis/Modification metagene, wherein an altered or modulated relative expression level of the overexpressed genes compared to the underexpressed genes indicates or correlates with relatively increased or decreased responsiveness of the cancer to the anti-cancer treatment.

[0044] In one embodiment of the eleventh and twelfth aspects, the one or plurality of overexpressed genes and/or the one or plurality of underexpressed genes are selected from one of the metagenes. In an alternative embodiment, the one or plurality of overexpressed genes and/or the one or plurality of underexpressed genes are selected from a plurality of the metagenes.

[0045] Suitably, the Metabolism metagene, the Signalling metagene, the Development and Growth metagene, the Chromosome Segregation/Replication metagene, the Immune Response metagene and/or the Protein Synthesis/Modification metagene comprise one or a plurality of genes listed in Table 22.

[0046] In particular embodiments, the one or plurality of overexpressed genes and the one or plurality of underexpressed genes are from one or a plurality of a Carbohydrate/Lipid Metabolism metagene, a Cell Signalling metagene, a Cellular Development metagene, a Cellular Growth metagene, a Chromosome Segregation metagene, a DNA Replication/Recombination metagene, an Immune System metagene, a Metabolic Disease metagene, a Nucleic Acid Metabolism metagene, a Post-Translational Modification metagene, a Protein Synthesis/Modification metagene and a Multiple Networks metagene.

[0047] According to the method of the eleventh and twelfth aspects, the step of comparing an expression level of one or a plurality of overexpressed genes and/or an expression level of one or a plurality of underexpressed genes includes comparing an average expression level of the one or plurality of overexpressed genes and/or an average expression level of the one or plurality of underexpressed genes. This may include calculating a ratio of the average expression level of the one or plurality of overexpressed genes and the average expression level of the one or plurality of underexpressed genes. Suitably, the ratio provides an aggressiveness score which is indicative of, or correlates with, cancer aggressiveness and a less favourable prognosis. Alternatively, the step of comparing an expression level of one or a plurality of overexpressed genes and/or an expression level of one or a plurality of underexpressed genes includes comparing the sum of expression levels of the one or plurality of overexpressed genes and/or the sum of expression levels of the one or plurality of underexpressed genes. This may include calculating a ratio of the sum of expression levels of the one or plurality of overexpressed genes and/or the sum of expression levels of the one or plurality of underexpressed genes.

[0048] In a thirteenth aspect, the invention provides a method of predicting the responsiveness of a cancer to an anti-cancer treatment in a mammal, said method including the step of determining an expression level of one or a plurality of genes associated with chromosomal instability in one or a plurality of non-mitotic cancer cells of the mammal, wherein a higher expression level indicates or correlates with relatively increased responsiveness of the cancer to the anti-cancer treatment

[0049] Suitably, the one or plurality of genes associated with chromosomal instability are selected from the group consisting of: TTK, CEP55, FOXM1 and SKIP2 and/or any CIN genes listed in Table 4.

[0050] In a fourteenth aspect, the invention provides a method of predicting the responsiveness of a cancer to an anti-cancer treatment in a mammal, said method including the step of comparing an expression level of one or a plurality of overexpressed genes associated with chromosomal instability and/or an expression level of one or a plurality of underexpressed genes associated with estrogen receptor signalling in one or a plurality of cancer cells, tissues or organs of the mammal, wherein an altered or modulated relative expression level of the one or plurality of overexpressed genes associated with chromosomal instability compared to the one or plurality of underexpressed genes associated with estrogen receptor signalling indicates or correlates with relatively increased or decreased responsiveness of the cancer to the anti-cancer treatment.

[0051] In certain embodiments, the genes associated with chromosomal instability are of a CIN metagene. Non-limiting examples include genes selected from the group consisting of: ATP6V1C1, RAP2A, CALM1, COG8, HELLS, KDM5A, PGK1, PLCH1, CEP55, RFC4, TAF2, SF3B3, GP1, PIR, MCM10, MELK, FOXM1, KIF2C, NUP155, TPX2, 11K, CENPA, CENPN, EXO1, MAPRE1, ACOT7, NAE1, SHMT2, TCP1, TXNRD1, ADM, CHAF1A and SYNCRIP. Preferably, the genes are selected from the group consisting of: MELK, MCM10, CENPA, EXO1, TTK and KIF2C.

[0052] In certain embodiments, the genes associated with estrogen receptor signalling are of an ER metagene. Non-limiting examples include genes selected from the group consisting of: BTG2, PIK3IP1, SEC14L2, FLNB, ACSF2, APOM, BIN3, GLTSCR2, ZMYND10, ABAT, BCAT2, SCUBE2, RUNX1, LRRC48, MYBPC1, BCL2, CHPT1, ITM2A, LRIG1, MAPT, PRKCB, RERE, ABHD14A, FLT3, TNN, STC2, BATF, CD1E, CFB, EVL, FBXW4, ABCB1, ACAA1, CHAD, PDCD4, RPL10, RPS28, RPS4X, RPS6, SORBS1, RPL22 and RPS4XP3. Preferably, the genes are selected from the group consisting of: MAPT and MYB.

[0053] Suitably, the method of this aspect further includes the step of comparing an expression level of one or a plurality of other overexpressed genes selected from the group consisting of CAMSAP1, CETN3, GRHPR, ZNF593, CA9, CFDP1, VPS28, ADORA2B, GSK3B, LAMA4, MAP2K5, HCFC1R1, KCNG1, BCAP31, ULBP2, CARHSP1, PML, CD36, CD55, GEMIN4, TXN, ABHD5, EIF3K, EIF4B, EXOSC7, GNB2L1, LAMA3, NDUFC1 and STAU1, and/or an expression level of one or a plurality of other underexpressed genes selected from the group consisting of BRD8, BTN2A2. KIR2DL4. ME1, PSEN2, CALR, CAMK4, ITM2C, NOP2, NSUN5, SF3B1, ZNRD1-AS1, ARNT2, ERC2, SLC11A1, BRD4, APOBEC3A, CD1A, CD1B, CD1C, CXCR4, HLA-B, IGH, KIR2DL3, SMPDL3B, MYB, RLN1, MTMR7, SORBS1 and SRPK3 in one or a plurality of cancer cells, tissues or organs of the mammal, wherein an altered or modulated relative expression level of the one or plurality of other overexpressed genes compared to the one or plurality of other underexpressed genes indicates or correlates with relatively increased or decreased responsiveness of the cancer to the anti-cancer treatment.

[0054] In one embodiment, the one or plurality of other overexpressed genes are selected from the group consisting of ABHD5, ADORA2B, BCAP31, CA9, CAMSAP1, CARHSP1, CD55, CETN3, EIF3K, EXOSC7, GNB2L1, GRHPR, GSK3B, HCFC1R1, KCNG1, MAP2K5, NDUFC1, PML, STAU1, TXN and ZNF593.

[0055] In one embodiment, the one or plurality of other underexpressed genes are selected from the group consisting of BTN2A2, ERC2, IGH, ME1, MTMR7, SMPDL3B and ZNRD1-AS1.

[0056] In certain embodiments, the comparison of the expression level of the one or plurality of other overexpressed genes and/or the expression level of the one or plurality of other underexpressed genes is integrated with the comparison of the expression level of the one or plurality of overexpressed genes associated with chromosomal instability and/or the expression level of the one or plurality of underexpressed genes associated with estrogen receptor signalling to derive a first integrated score, which is indicative of, or correlates with, responsiveness of the cancer to the anti-cancer treatment. By way of example, the first integrated score may be derived, at least in part, by addition, subtraction, multiplication, division and/or exponentiation. Preferably, the integrated score is derived by exponentiation, wherein the comparison of the expression level of the one or plurality of other overexpressed genes and the expression level of the one or plurality of other underexpressed genes is raised to the power of the comparison of the expression level of the one or plurality of overexpressed genes associated with chromosomal instability and the expression level of the one or plurality of underexpressed genes associated with estrogen receptor signalling.

[0057] In a fifteenth aspect, the invention provides a method of predicting the responsiveness of a cancer to an anti-cancer treatment in a mammal, said method including the step of comparing an expression level of one or a plurality of overexpressed genes selected from the group consisting of CAMSAP1, CETN3, GRHPR, ZNF593, CA9, CFDP1, VPS28, ADORA2B, GSK3B, LAMA4, MAP2K5, HCFC1R1, KCNG1, BCAP31, ULBP2, CARHSP1, PML, CD36, CD55, GEMIN4, TXN, ABHD5, EIF3K, EIF4B, EXOSC7, GNB2L1, LAMA3, NDUFC1 and STAU1, and/or an expression level of one or a plurality of underexpressed genes selected from the group consisting of BRD8, BTN2A2. KIR2DL4. ME1, PSEN2, CALR, CAMK4, ITM2C, NOP2, NSUN5, SF3B1, ZNRD1-AS1, ARNT2, ERC2, SLC11A1, BRD4, APOBEC3A, CD1A, CD1B, CD1C, CXCR4, HLA-B, IGH, KIR2DL3, SMPDL3B, MYB, RLN1, MTMR7, SORBS1 and SRPK3, in one or a plurality of cancer cells, tissues or organs of the mammal, wherein an altered or modulated relative expression level of the one or plurality of overexpressed genes compared to the one or plurality of underexpressed genes indicates or correlates with relatively increased or decreased responsiveness of the cancer to the anti-cancer treatment.

[0058] In one embodiment, the one or plurality of overexpressed genes are selected from the group consisting of ABHD5, ADORA2B, BCAP31, CA9, CAMSAP1, CARHSP1, CD55, CETN3, EIF3K, EXOSC7, GNB2L1, GRHPR, GSK3B, HCFC1R1, KCNG1, MAP2K5, NDUFC1, PML, STAU1, TXN and ZNF593.

[0059] In one embodiment, the one or plurality of underexpressed genes are selected from the group consisting of BTN2A2, ERC2, IGH, ME1, MTMR7, SMPDL3B and ZNRD1-AS1.

[0060] Suitably, the method of the eleventh, twelfth, thirteenth, fourteenth and fifteenth aspects further includes the step of comparing an expression level of a one or a plurality of overexpressed proteins selected from the group consisting of DVL3, PAI-1, VEGFR2, INPP4B, EIF4EBP1, EGFR, Ku80, HER3, SMAD1, GATA3, ITGA2, AKT1, NFKB1, HER2, ASNS and COL6A1, and/or an expression level of one or a plurality of underexpressed proteins selected from the group consisting of VEGFR2, HER3, ASNS, MAPK9, ESR1, YWHAE, RAD50, PGR, COL6A1, PEA15 and RPS6, in one or a plurality of cancer cells, tissues or organs of the mammal, wherein an altered or modulated relative expression level of the one or plurality of overexpressed proteins compared to the one or plurality of underexpressed proteins indicates or correlates with relatively increased or decreased responsiveness of the cancer to the anti-cancer treatment.

[0061] Suitably, the comparison of the expression level of the one or plurality of overexpressed proteins and/or the expression level of the one or plurality of underexpressed proteins is to thereby derive an integrated score. In one particular embodiment, the comparison of the expression level of the one or plurality of overexpressed proteins and/or the expression level of the one or plurality of underexpressed proteins is integrated with:
[0062] (i) the comparison of the expression level of the overexpressed genes associated with chromosomal instability and/or the expression level of the underexpressed genes associated with estrogen receptor signalling to derive a second integrated score; or
[0063] (ii) the first integrated score to derive a third integrated score; or
[0064] (iii) the comparison of the expression level of the overexpressed genes selected from the group consisting of CAMSAP1, CETN3, GRHPR, ZNF593, CA9, CFDP1, VPS28, ADORA2B, GSK3B, LAMA4, MAP2K5, HCFC1R1, KCNG1, BCAP31, ULBP2, CARHSP1, PML, CD36, CD55, GEMIN4, TXN, ABHD5, EIF3K, EIF4B, EXOSC7, GNB2L1, LAMA3, NDUFC1 and STAU1 and/or the expression level of the underexpressed genes selected from the group consisting of BRD8, BTN2A2. KIR2DL4. ME1, PSEN2, CALR, CAMK4, ITM2C, NOP2, NSUN5, SF3B1, ZNRD1-AS1, ARNT2, ERC2, SLC11A1, BRD4, APOBEC3A, CD1A, CD1B, CD1C, CXCR4, HLA-B, IGH, KIR2DL3, SMPDL3B, MYB, RLN1, MTMR7, SORBS1 and SRPK3 to derive a fourth integrated score; or
[0065] (iv) the comparison of the expression level of the overexpressed genes and an expression level of the underexpressed genes, wherein the genes are from one or a plurality of the Carbohydrate/Lipid Metabolism metagene, the Cell Signalling metagene, the Cellular Development metagene, the Cellular Growth metagene, the Chromosome Segregation metagene, the DNA Replication/Recombination metagene, the Immune System metagene, the Metabolic Disease metagene, the Nucleic Acid Metabolism metagene, the Post-Translational Modification metagene, the Protein Synthesis/Modification metagene and/or the Multiple Networks metagene, to derive a fifth integrated score; or
[0066] (v) the comparison of the expression level of the overexpressed genes and an expression level of the underexpressed genes, wherein the genes are from one or a plurality of the Metabolism metagene, the Signalling metagene, the Development and Growth metagene, the Chromosome Segregation/Replication metagene, the Immune Response metagene and/or the Protein Synthesis/Modification metagene, to derive a sixth integrated score.
   wherein the second, third, fourth, fifth and/or sixth integrated score is indicative of, or correlates with, responsiveness of the cancer to the anti-cancer treatment.

[0067] In particular embodiments the first, second, third, fourth, fifth and/or sixth integrated score are derived, at least in part, by addition, subtraction, multiplication, division and/or exponentiation.

[0068] In a preferred embodiment, the first, second and/or third integrated scores are derived, at least in part, by exponentiation wherein the comparison of the expression level of the other overexpressed genes and/or the expression level of the other underexpressed genes is raised to the power of
[0069] (i) the comparison of the expression level of the overexpressed genes associated with chromosomal instability and/or the expression level of the underexpressed genes associated with estrogen receptor signalling; and/or
[0070] (ii) the comparison of the expression level of the overexpressed proteins and/or the expression level of the underexpressed proteins.

[0071] In a sixteenth aspect, the invention provides method of predicting the responsiveness of a cancer to an anti-cancer treatment in a mammal, said method including the step of comparing an expression level of one or a plurality of overexpressed proteins selected from the group consisting of DVL3, PM-1, VEGFR2, INPP4B, EIF4EBP1, EGFR, Ku80, HER3, SMAD1, GATA3, ITGA2, AKT1, NFKB1, HER2, ASNS and COL6A1, and/or an expression level of one or a plurality of underexpressed proteins selected from the group consisting of VEGFR2, HER3, ASNS, MAPK9, ESR1, YWHAE, RAD50, PGR, COL6A1, PEA15 and RPS6, in one or a plurality of cancer cells, tissues or organs of the mammal, wherein an altered or modulated relative expression level of the one or plurality of overexpressed proteins compared to the one or plurality of underexpressed proteins indicates or correlates with relatively increased or decreased responsiveness of the cancer to the anti-cancer treatment.

[0072] Suitably, the anticancer treatment of the eleventh, twelfth, thirteenth, fourteenth, fifteenth and sixteenth aspects is selected from the group consisting of endocrine therapy, chemotherapy, immunotherapy and a molecularly targeted therapy. In certain embodiments, the anticancer treatment comprises an anaplastic lymphoma kinase (ALK) inhibitor, a BCR-ABL inhibitor, a heat shock protein 90 (HSP90) inhibitor, an epidermal growth factor receptor (EGFR) inhibitor, a poly (ADP-ribose) polymerase (PARP) inhibitor, retinoic acid, a B-cell lymphoma 2 (Bcl2) inhibitor, a gluconeogenesis inhibitor, a p38 mitogen-activated protein kinase (MAPK) inhibitor, a mitogen-activated protein kinase kinase 1/2 (MEK1/2) inhibitor, a mammalian target of rapamycin (mTOR) inhibitor, a phosphatidylinositol-4,5-bisphosphate 3-kinase (PI3K) inhibitor, an insulin-like growth factor 1 receptor (IGF1R) inhibitor, a phospholipase C-γ (PLCγ) inhibitor, a c-Jun N-terminal kinase (JNK) inhibitor, a p21-activated kinase-1 (PAK1) inhibitor, a spleen tyrosine kinase (SYK) inhibitor, a histone deacetylase (HDAC) inhibitor, a fibroblast growth factor receptor (FGFR) inhibitor, an X-linked inhibitor of apoptosis (XIAP) inhibitor, a polo-like kinase 1 (PLK1) inhibitor, an extracellular-signal-regulated kinase 5 (ERK5) inhibitor and combinations thereof.

[0073] Suitably, the method of the eleventh, twelfth, thirteenth, fourteenth, fifteenth and sixteenth aspects further includes the step of administering to the mammal a therapeutically effective amount of the anticancer treatment. Preferably, the anticancer treatment is administered when the altered or modulated relative expression level indicates or correlates with relatively increased responsiveness of the cancer to the anti-cancer treatment.

[0074] In a seventeenth aspect, the invention provides a method of predicting the responsiveness of a cancer to an immunotherapeutic agent in a mammal, said method including the step of comparing an expression level of one or a plurality of overexpressed genes selected from the group consisting of ADORA2B, CD36, CETN3, CFDP1, KCNG1, LAMA3, NAE1, MAP2K5, PGK1, SF3B3, STAU1 and TXN and/or an expression level of one or a plurality of underexpressed genes selected from the group consisting of APOBEC3A, BTN2A2, BCL2, CAMK4, FBXW4, CAMSAP1, CARHSP1, GSK3B, HCFC1R1, PSEN2, MYB and ZNF593, in one or a plurality of cancer cells, tissues or organs of the mammal, wherein an altered or modulated relative expression level of the one or plurality of overexpressed genes compared to the one or plurality of underexpressed genes indicates or correlates with relatively increased or decreased responsiveness of the cancer to the immunotherapeutic agent.

[0075] Suitably, the immunotherapeutic agent is an immune checkpoint inhibitor. Preferably, the immune checkpoint inhibitor is or comprises an anti-PD1 antibody or an anti-PDL1 antibody.

[0076] In an eighteenth aspect is provided a method of predicting the responsiveness of a cancer to an epidermal; growth factor receptor (EGFR) inhibitor in a mammal, said method including the step of comparing an expression level of one or a plurality of overexpressed genes selected from the group consisting of NAE1, GSK3B, TAF2, MAPRE1, BRD4, STAU1, TAF2, PDCD4, KCNG1, ZNRD1-AS1, EIF4B, HELLS, RPL22, ABAT, BTN2A2, CD1B, ITM2A, BCL2, CXCR4, and ARNT2 and/or an expression level of one or a plurality of underexpressed genes selected from the group consisting of CD1C, CD1E, CD1B, KDM5A, BATF, EVL, PRKCB, HCFC1R1, CARHSP1, CHAD, KIR2DL4, ABHD5, ABHD14A, ACAA1, SRPK3, CFB, ARNT2, NDUFC1, BCL2, EVL, ULBP2, BIN3, SF3B3, CETN3, SYNCRIP, TAF2, CENPN, ATP6V1C1, CD55 and ADORA2B in one or a plurality of cancer cells, tissues or organs of the mammal, wherein an altered or modulated relative expression level of the one or plurality of overexpressed genes compared to the one or plurality of underexpressed genes indicates or correlates with relatively increased or decreased responsiveness of the cancer to the EGFR inhibitor.

[0077] In a nineteenth aspect is provided a method of predicting the responsiveness of a cancer to a multikinase inhibitor in a mammal, said method including the step of comparing an expression level of one or a plurality of overexpressed genes selected from the group consisting of SCUBE, CHPT1, CDC1, BTG2, ADORA2B and BCL2, and/or an expression level of one or a plurality of underexpressed genes selected from the group consisting of NOP2, CALR, MAPRE1, KCNG1, PGK1, SRPK3, RERE, ADM, LAMA3, KIR2DL4, ULBP2, LAMA4, CA9, and BCAP31, in one or a plurality of cancer cells, tissues or organs of the mammal, wherein an altered or modulated relative expression level of the one or plurality of overexpressed genes compared to the one or plurality of underexpressed genes indicates or correlates with relatively increased or decreased responsiveness of the cancer to the multikinase inhibitor.

[0078] Suitably, for the method of the seventeenth, eighteenth and nineteenth aspects, a higher relative expression level of the one or plurality of overexpressed genes compared to the one or plurality of underexpressed genes indicates or correlates with a relatively increased responsiveness of the cancer to the immunotherapeutic agent, EGFR inhibitor or multikinase inhibitor; and/or a lower relative expression level of the one or aplurality of overexpressed genes compared to the one or plurality of underexpressed genes indicates or correlates with a relatively decreased responsiveness of the cancer to the immunotherapeutic agent, EGFR inhibitor and/or multikinase inhibitor.

[0079] In some embodiments, the method of the seventeenth, eighteenth and nineteenth aspects further includes the step of administering to the mammal a therapeutically effective amount of the immunotherapeutic agent, the EGFR inhibitor or the multikinase inhibitor respectively. Preferably, the immunotherapeutic agent, the EGFR inhibitor or the multikinase inhibitor is administered when the altered or modulated relative expression level indicates or correlates with relatively increased responsiveness of the cancer to the immunotherapeutic agent, the EGFR inhibitor or the multikinase inhibitor respectively.

[0080] Suitably, for the methods of the aforementioned aspects, the step of comparing an expression level of one or a plurality ofoverexpressed genes or proteins and an expression level of one or a plurality of underexpressed genes or proteins, includes comparing an average expression level of the one or plurality of overexpressed genes or proteins and an average expression level of the one or plurality of underexpressed genes or proteins. This may include calculating a ratio of the average expression level of the one or plurality of overexpressed genes or proteins and the average expression level of the one or plurality of underexpressed genes or proteins. Suitably, the ratio provides an aggressiveness score which is indicative of, or correlates with, cancer aggressiveness and a less favourable prognosis. Alternatively, the step of comparing an expression level of one or a plurality of overexpressed genes and an expression level of one or a plurality of underexpressed genes or proteins, includes comparing the sum of expression levels of the one or plurality of overexpressed genes or proteins and the sum of expression levels of the one or plurality of underexpressed genes or proteins. This may include calculating a ratio of the sum of expression levels of the one or plurality of overexpressed genes or protein and the sum of expression levels of the one or plurality of underexpressed genes or proteins.

[0081] In certain embodiments of the aforementioned methods, the mammal is subsequently treated for cancer.

[0082] In a twentieth aspect, the invention provides a method for identifying an agent for use in the treatment of cancer including the steps of:

[0083] (i) contacting a protein product of GRHPR, NDUFC1, CAMSAP1, CETN3, EIF3K, STAU1, EXOSC7, COG8, CFDP1 and/or KCNG1 with a test agent; and

[0084] (ii) determining whether the test agent, at least partly, reduces, eliminates, suppresses or inhibits the expression and/or an activity of the protein product.

[0085] Suitably, the agent possesses or displays little or no significant off-target and/or nonspecific effects.

[0086] Preferably, the agent is an antibody or a small organic molecule.

[0087] In a twenty first aspect, the invention provides an agent for use in the treatment of cancer identified by the method of the eighteenth aspect.

[0088] In a twenty second aspect, the invention provides a method of treating a cancer in a mammal, including the step of administering to the mammal a therapeutically effective amount of an agent identified by the method of the eighteenth aspect.

[0089] Preferably, for the invention of the twentieth, twenty first and twenty second aspects, the cancer has an overexpressed gene selected from the group consisting of GRHPR, NDUFC1, CAMSAP1, CETN3, EIF3K, STAU1, EXOSC7, COG8, CFDP1, KCNG1 and any combination thereof.

[0090] Suitably, the method of the aformentioned aspects further includes the step of determining, assessing or measuring the expression level of one or plurality of the overexpressed genes, the underexpressed genes, the overexpressed proteins and/or the underexpressed proteins described herein.

[0091] Suitably, the mammal referred to in the aforementioned aspects and embodiments is a human.

[0092] In certain embodiments of the invention of the aforementioned aspects, the cancer includes breast cancer, lung cancer inclusive of lung adenocarcinoma and lung squamous cell carcinoma, cancers of the reproductive system inclusive of ovarian cancer, cervical cancer, uterine cancer and prostate cancer, cancers of the brain and nervous system, head and neck cancers, gastrointestinal cancers inclusive of colon cancer, colorectal cancer and gastric cancer, liver cancer inclusive of hepatocellular carcinoma, kidney cancer inclusive of renal clear cell carcinoma and renal papillary cell carcinoma, skin cancers such as melanoma and skin carcinomas, blood cell cancers inclusive of lymphoid cancers and myelomonocytic cancers, cancers of the endocrine system such as pancreatic cancer and pituitary cancers, musculoskeletal cancers inclusive of bone and soft tissue cancers, although without limitation thereto. By way of example, breast cancer includes aggressive breast cancers and cancer subtypes such as triple negative breast cancer, grade 2 breast cancer, grade 3 breast cancer, lymph node positive (LN⁺) breast cancer, HER2 positive (HER2⁺) breast cancer and ER positive (ER⁺) breast cancer, although without limitation thereto.

[0093] Unless the context requires otherwise, the terms “comprise”, “comprises” and “comprising”, or similar terms are intended to mean a non-exclusive inclusion, such that a recited list of elements or features does not include those stated or listed elements solely, but may include other elements or features that are not listed or stated.

[0094] The indefinite articles ‘a’ and ‘an’ are used here to refer to or encompass singular or plural elements or features and should not be taken as meaning or defining “one” or a “single” element or feature.

### BRIEF DESCRIPTION OF THE FIGURES

[0095] FIG. 1: Correlation of breast cancer subtypes and the aggressiveness gene list. The METABRIC dataset was visualized according to the expression of the 206 genes (Table 4) in the aggressiveness gene list. The aggressiveness score for each tumor was calculated as the ratio of the CIN metagene (average value for CIN genes expression) to the ER metagene (average value for ER genes expression). (A) The expression of the aggressiveness gene list according to the GENIUS histological classification. Box plot shows the aggressiveness score of the histological subtypes. (B) The overall survival of patients in the METABRIC dataset was analyzed according to the aggressiveness score (upper row: by quartiles; lower row: by median) in all patients, non-TNBC patients and in patients with ER+ Grade 2 tumors. The hazard ratio (HR) and confidence interval (CI) and p-value for comparisons of upper quartile vs. lower quartiles (upper row) and at the dichotomy across the median (high vs. low) are shown (Log-rank Test, GraphPad® Prism). The number of patients (n) in each group is shown in brackets.

[0096] FIG. 2: Network analysis of the aggressiveness gene list. (A) Ingenuity pathway analysis was performed using direct interactions on the 206 genes in the aggressiveness gene list (red is overexpressed and green is underexpressed). One network of high direct interactions was identified. (B) The genes in the network in A were investigated for their correlation with the aggressiveness score and overall survival (Table 5) and eight genes (MAPT, MYB, MELK, MCM10, CENPA, EXO1, TTK and KIF2C) with the highest correlation were still connected in a direct interaction network. (C) The overall survival of patients in the METABRIC dataset was analyzed according to score from the 8 genes in C (upper row: by quartiles; lower row: by median) in all patients, non-TNBC patients and in patients with ER+ Grade 2 tumors.

[0097] FIG. 3: Survival of patients stratified by the 8-genes score in the METABRIC dataset. The overall survival of patients in the METABRIC dataset was analyzed according to the 8-genes score in selected settings in all patients (A) or in ER-positive patients only (B). (A) TP53 mutation was compared in high vs. low 8-genes score (split by the median). The expression of the proliferation marker Ki67 was divided by dichotomy across the median and patients in each of these groups were then stratified according to their 8-genes score (split by quartiles). Disease stages (Stage I-Stage III) were stratified by the median 8-genes score. (B) ER⁺ Grade 3, ER+ lymph node negative (LN−) and ER+ LN+ tumors were stratified by the quartiles.

[0098] FIG. 4: The 8-genes score associates with survival of breast cancer patients. Four published datasets were used to validate the 8-genes score as a predictor of survival. The 8-genes score was calculated for tumors in each of the datasets and the survival of patients was stratified according to the median 8-genes score; (A) GSE2990¹⁵, (B) GSE3494⁶⁵, (C) GSE2034⁶⁶ and (D) GSE25066⁵³. The hazard ratio (HR) and confidence interval (CI) and p-value for comparisons high vs. low 8-genes score are shown in the Kaplan-Meier survival curves (Log-rank Test, GraphPad® Prism). The number of patients (n) is shown in brackets. The table in each panel show multivariate survival analysis in the using Cox-proportional hazard model including all available conventional indicators.

[0099] FIG. 5: Therapeutic targets in the aggressiveness gene list. (A) The TNBC cell lines, MDA-MB-231, SUM159PT and Hs578T were treated with control siRNA (Scrambled, Sc CTRL) or siRNA targeting the specified genes and the survival of these cells was compared on day 6. Data shown is the average from the three cell lines where each cell line was treated in triplicate. * p<0.05, ** p<0.01 and *** <0.001 from One-Way ANOVA analysis performed using GraphPad® Prism. Data for individual cell lines is shown in Table 5. (B) A panel of breast cancer cell lines was used to prepare lysates for immunoblotting of TTK. Tubulin was used as the loading control. (C) Dose response curves for the treatment of breast cancer cell lines in the absence or presence of escalating doses of the TTK inhibitor (TTKi) AZ3146. The survival of cells was measured using the CellTitre® MTS/MTA assay carried out 6 days after treatment. Percentage survival (n=3 per dose) was calculated as the percentage of the signal from treated cells to that from control cells. (D) The concentration of TTK required to affect the survival of 50% of the cells (IC50) was measured by GraphPad® Prism from the dose response curves in C for each cell line.

[0100] FIG. 6: TTK protein expression associates with breast cancer survival. The overall survival of patients in a large cohort of breast cancer patients (n=409) was stratified according to TTK staining by IHC (scores 0-3). Kaplan-Meier survival curves are shown for all patients (A) with four TTK staining (categories 0-3) and (B) two categories (0-2 vs. 3). Log-rank Test and p-value were used for survival curves. (C) The distribution of high TTK staining (category 3) across histological subgroups and mitotic indices. Data shown is the mitotic index (median+range) measured as the number of mitotic cells in 10 high power fields (hpf). The number of tumors with high TTK staining to the total number of tumors in the cohort is shown on the right. High TTK expression distributed across subtypes and did not associate with mitotic index.

[0101] FIG. 7: TTK associates with aggressive subtypes and is a therapeutic target. (A) Kaplan-Meier survival curves are shown for Grade 3 tumors, lymph node positive patients (LN⁺) and LN⁺ patients with grade 3 tumors. Log-rank Test and p-value were used for these survival curves. For patients with TNBC, and HER2, survival was statistically significant using the Gehan-Breslow-Wilcoxon test (p-values marked by asterisks) which gives more weight to deaths at early time points. The poorer survival of patients with high Ki67 tumors and high TTK staining was a trend but did not reach significance. Survival curves and statistical analyses were performed using GraphPad® Prism. (B) TNBC and non-TNBC cell lines were treated for 6 days with the specified concentrations of docetaxel (doc) alone, TTK inhibitor (TTKi) alone of the combinations. The survival of cells was measured using the MTS/MTA assay as described in Methods. *** p<0.001 comparing the combination to single agents and to non-TNBC cell lines from Two-Way Anova in GraphPad® Prism. (C) MDA-MB-231 cells were treated with docetaxel or TTKi alone or in combination and collected at 96 hours to perform apoptosis assays by flow cytometry. Early apoptotic cells were defined as annexin V+/7-AAD-.

[0102] FIG. 8: Global gene expression meta-analysis of genes deregulated in TNBC, metastatic events and death at 5 years in Oncomine™. (A) TNBC in 8 datasets were compared to non-TNBC, (B) tumors with metastatic events at 5 years were compared to those with no metastatic events at 5 years in 7 datasets and (C) tumors leading to death at 5 years were compared to those that did not lead to death at 5 years were compared in 7 datasets. The datasets used in the comparisons are stated in the legends and the key for the heatmap coloring is also included. The heatmap key denotes the top or bottom x % placement of a gene according to gene rank which is based on the p-value.

[0103] FIG. 9: The derivation of the 206 aggressiveness gene list. (A and B) are Venn diagrams for the top overexpressed genes and bottom underexpressed genes shared between TNBC and/or metastasis and death at 5 years analyses in Oncomine™. (C and D) The Venn diagrams from A and B were crossed with genes which were deregulated in TNBC in comparison to adjacent normal breast tissue from the METABRIC dataset. The genes marked in bold in panels C and D are the 206 genes which constitute the unfiltered aggressiveness gene list.

[0104] FIG. 10: Common genes between the 206 aggressiveness gene list and metagene attractors. Venn diagrams show common genes (in bold) between the 206 aggressiveness gene list and the chromosomal instability (CIN), lymphocyte-specific and ER attractors (Cheng et al 2013a, Cheng et al 2013b). The table below lists the shared genes. The 6 overexpressed genes (marked in red) and 2 underexpressed genes (marked in green) which constitute the 8-genes signature in this study are shown. Gene set enrichment analysis of the remaining 140 genes which were only present in the 206 gene signature reveal that these genes function in cell cycle.

[0105] FIG. 11: Correlation of breast cancer subtypes and the aggressiveness gene list. The METABRIC dataset was visualized according to the expression of the 206 genes in the aggressiveness gene list. The aggressiveness score for each tumor was calculated as the sum of normalized z-score expression values of overexpressed genes divided by that of underexpressed genes. (A and B) The expression of the aggressiveness gene list was visualized according to PAM50 intrinsic subtypes and the integrative clusters classification. Box plots show the aggressiveness score of these subtypes. The shaded lines in box plots mark the median value for the aggressiveness score. *** p<0.001 One-Way ANOVA using GraphPad® Prism. Kaplan-Meier curves are of overall survival of patients in the METABRIC dataset stratified according to the quartiles (left plot) or the median (middle plot) of the aggressiveness score in ER+ patients with Grade 3 tumors. Tumors of the five PAM50 intrinsic subtypes which show high aggressiveness score (higher than the median) did not show statistical difference in overall survival (right plot). The hazard ratio (HR) and the 95% confidence interval (CI) and the p-value are reported using the Log-rank Test.

[0106] FIG. 12: Survival of the PAM50 breast cancer subtypes in the METABRIC dataset according to the aggressiveness score. The survival of patients in the METABRIC dataset annotated based on the PAM50 subtypes was analyzed by dichotomy across the median aggressiveness score from the 206 gene list (A) and the reduced 8 gene list (B). The p-value are reported using the Log-rank Test in GraphPad® Prism and show that all tumors with the different PAM50 subtypes but high aggressiveness score did not show a difference in patient survival (left graphs), whereas the PAM50 subtypes showed significantly different survival only in low aggressiveness score setting.

[0107] FIG. 13: TTK staining association with patient survival. The overall survival of patients in a large cohort of breast cancer patients (n=409) was stratified according to TTK staining by IHC (scores 0-3). Kaplan-Meier survival curves are shown for all patients (with four TTK staining categories 0-3 and two categories (0-2 vs. 3) with 10 and 20 years follow up. Log-rank Test and p-value were used for survival curves of all patients. There were no statistical differences in the survival of patients with Grade 1, Grade 2 or hormone positive tumors when stratified by TTK expression. Survival curves and statistical analyses were performed using GraphPad® Prism.

[0108] FIG. 14: Criteria used for assigning ‘prognostic subgroups’ in this study.

[0109] FIG. 15: Panel 1: Overall survival curves of lung cancer patients split by ten (10) CIN and two (2) ER genes as a signature; patients are low or high according to the median of the signature; Panel 2: Survival curves for lung adenocarconima split by ten (10) CIN genes and two (2) ER genes as a signature; patients are low or high according to the median of the signature; Panel 3: Survival curves for lung adenocarconima (10 years) split by ten (10) CIN genes and two (2) ER genes as a signature; patients are low or high according to the median of the signature; Panel 4: Survival curves for lung adenocarconima split by six (6) CIN genes and two (2) ER genes as a signature; patients are low or high according to the median of the signature; and Panel 5: Survival curves for lung adenocarconima (10 years) split by six (6) CIN genes and two (2) ER genes as a signature; patients are low or high according to the median of the signature.

[0110] FIG. 16: (A) RNA-Seq data from the breast cancer cohort of The Cancer Genome Atlas (TCGA) data. (B) Recurrence-free survival of breast cancer patients in the TCGA stratified by the Aggressiveness score compared to the OncotypeDx recurrence score. (C) Comparison of copy number variations (CNVs) of breast tumours with high aggressiveness score to those with low aggressiveness score.

[0111] FIG. 17: (A) RNA-Seq data from all cancers of The Cancer Genome Atlas (TCGA) data. (B) Recurrence-free survival of all cancer patients in the TCGA stratified by the Aggressiveness score compared to the OncotypeDx recurrence score.

[0112] FIG. 18: Recurrence-free survival or overall survival of cancer patients with different cancer types in the TCGA data patients stratified by the 8-genes aggressiveness score.

[0113] FIG. 19: Outline of Example 2. Meta-analysis was performed in Oncomine™ using breast cancer datasets irrespective of subtypes or gene expression array platforms used. The global gene expression profiles of breast tumors that led to metastatic or death event within 5 years were compared to those that did not and the top overexpressed (OE) and underexpressed genes (UE) in these comparisons were selected. The commonly deregulated genes in the primary tumors that led to metastatic and death events (depending on the annotation of each dataset) were then interrogated using the online tool KIVI-Plotter™ (n>4000 patients with some overlap with the datasets in Oncomine™). Only genes which associated with relapse-free survival (RFS), distant metastasis-free survival (DMFS) or overall survival (OS) of basal-like breast cancer (BLBC) or ER-negative (ER⁻) breast cancer were selected. The 96 genes from this training were then shortlisted to 28 genes by selecting the most significant and persistent across the different outcomes (RFS, DMFS and OS). The 28-gene signature was then validated in large cohorts of breast cancer gene expression studies including The Cancer Genome Atlas (TCGA) dataset the Research Online Cancer Knowledgebase (ROCK) dataset and the homogenous TNBC dataset for prognostication of ER−, TNBC and BLBC subtypes. Finally, the TN signature was then investigated for association with pathological complete response (pCR) after neoadjuvant chemotherapy in studies which performed gene expression profiling prior to therapy.

[0114] FIG. 20: The 28-gene TN signature associates with RFS, DMFS and OS of BLBC and ER− breast cancer. The 21 overexpressed and 7 underexpressed genes were used as a signature in the online tool KM-Plotter. The signature (the average expression of the 21 overexpressed genes and the inverted expression of the 7 underexpressed genes) stratified the RFS, DMFS and OS; low: under the median of the expression of the signature and high: over the median of the expression of the signature. The hazard ratio (HR) and log-rank p-value (p) for the univariate survival analyses were generated by KM-Plotter. n=number of patients.

[0115] FIG. 21: The prognostication by the TN score outperforms standard clinicothapological indicators in TNCBC, BLBC and ER− breast cancer subtypes. Two datasets, (A) the TNBC dataset and (B&C) the ROCK dataset, were analyzed for the TN signature and the TN score was calculated as the ratio of the average expression of the 21 overexpressed genes to that of the 7 underexpressed genes. This score was calculated for each tumor and the median TN score over the entire dataset was used to classify tumors as high (above the median) or low (below the median) for the TN score. (A) RFR of TNBC patients in the TNBC cohort stratified by dichotomy across the median TN score in the cohort. Table under the survival curve shows univariate and multivariate survival analysis for the TN score and other available clinical indicators recorded in the dataset. The TN score outperformed all the clinical indicators in the multivariate analysis. (B) RFS and DMFS of BLBC in the ROCK dataset stratified by dichotomy across the median TN score in the dataset. The table under the survival curves shows multivariate survival analysis for the TN score against other available clinical indicators recorded in the dataset. The TN score outperformed all the clinical indicators in the multivariate analysis of BLBC cases. (C) The RFS and DMFS of ER− negative breast cancer were stratified by the TN score (data not shown) and the table shows the multivariate survival analysis that the TN score outperforms clinical indicators in ER⁻ breast cancer cases.

[0116] FIG. 22: The TN score stratifies the overall survival of ER− breast cancer patients in the TCGA dataset. The gene expression data using the Illumina HiSeq RNA-seq arrays from the TCGA breast cancer data (n=1106) were used to calculate the TN score for all tumors. Tumors were classified as high or low for the TN score by dichotomy across the median TN score. The overall survival (OS) of ER− breast cancer cases with high TN score were compared to those with low TN score. The table below the survival curve shows that the TN score is more significant than other clinical indicators in univariate survival analysis and it is the only significant prognostic indicator in multivariate survival analysis.

[0117] FIG. 23: The TN score associates with pCR after chemotherapy in ER⁻HER2⁻ breast cancer. Gene expression datasets which profiled tumors prior to neoadjuvant chemotherapy and recorded pathological complete responses (pCR) vs. no pCR or residual disease (RD) were analyzed for the TN signature and the TN score was calculated for each tumor. Tumors were classified as high or low TN score by dichotomy across the median TN score in each dataset. Only ER-HER2− cases were used in the data shown in the Figure. (A) Graphs showing the percentage of cases achieving (red bars) or not achieving (black bars) pCR in low and high TN score subgroups. Fisher's exact test was used to analyze the 2×2 contingency tables and the p-value from this test was reported when statistical significance was observed. The dotted line marks the 31% pCR rate reported in literature for TNBC. Each dataset is labeled with the accession number and the chemotherapy regimen used, namely: GSE18728, GSE50948, GSE20271, GSE20194, GSE22226, GSE42822 and GSE23988. Chemotherapy abbreviation: 5-FU, Adriamycin, Cyclophosphamide, Taxane, X: Xeloda, Methotrexate, Epirubicin. (B) The dataset GSE22226 from the ISPY-1 trial was used to compare the TN score and pCR in the prediction of ER⁻ patient survival after neoadjuvant chemotherapy as this dataset also recorded RFS. pCR strongly associated with RFS (first panel) as previously reported. the TN score (next three panel) was not only predictive of survival in the these patients but could also stratified the survival of patients achieving or not achieving pCR, indicated the TN score as an independent prognostic factor for pCR after neoadjuvant chemotherapy.

[0118] FIG. 24: Drug sensitivity of cancer cell lines according to the TN score. The large published study by Garnett et al. was investigated where the TN score was calculated for each cell line in the study as described in Methods. The cell lines were classified as high or low TN score according to the median TN score to compare the sensitivity of low TN score cell lines (white boxes) and high TN score cell lines (red boxes). Graphs were prepared using GraphPad® Prism showing sensitivity as −log 10[IC50] in boxes (with median marked by a line) and whiskers (marking the 1st and 3rd quartiles and outliers as dots according to Tukey method for plotting the whiskers and outliers). Unpaired two-tailed t test was used for statistical analysis.

[0119] FIG. 25: The iBCR score stratifies the survival of all breast cancer patients irrespective of ER status in the ROCK dataset. The TN and Agro scores were calculated for each tumor in the ROCK dataset (n=1570, Affymetrix) and then the iBCR score was calculated as the TN score to the power of the Agro score. The RFS of all patients and the RFS of ER− or ER+ patients only was compared between high score and low score by dichotomy across the median score for each of the scores. The iBCR score was prognostic in all patients as well as ER− and ER+ subsets with better separation between low score and high score tumors (increased hazard ratio [HR] and limits of the 95% confidence intervals and decreased log rank p-value). Graphs and the univariate survival analysis using the log rank test were performed using GraphPad® Prism.

[0120] FIG. 26: The iBCR score stratifies the survival of all breast cancer patients irrespective of ER status in the TCGA dataset. The TN. Agro and the iBCR scores were calculated for each tumor in the TCGA dataset (n=1106, Illumina RNA-Seq). The RFS of all patients and the RFS of ER− or ER+ patients only was compared between high score and low score. As in the results in the ROCK dataset in FIG. 7, The iBCR score was prognostic in all patients as well as ER− and ER+ subsets with better separation between low score and high score tumors.

[0121] FIG. 27: The iBCR score associates with RFS and pCR after chemotherapy in the ISPY-1 trial. The dataset GSE22226 from the ISPY-1 trial was used to compare the Agro, TN and the integrated iBCR score in the prognosis and association with pCR after chemotherapy (Adriamycin, Cyclophosphamide and Taxane) in ER⁻HER2⁻ and ER⁺ breast cancer subtypes. Tumors were classified as high or low score by dichotomy across the median of each score in the entire dataset. High iBCR score ER⁻HER2⁻ tumors were less likely to achieve pCR and these patients had poor survival. High iBCR ER⁺ patients were more likely to achieve pCR but since a small number of ER⁺ patients achieved (10/62 [16%]), the survival of high iBCR ER+ patients remained poor. Note that the Agro score identifies all but two ER−HER2− tumors as high score, thus the data from this group should not be interpreted. Also note that the Agro score is highly prognostic of survival and association with pCR in ER⁺ whereas the TN score is not in these patients. The integration of these two scores in the iBCR score has overcame the limitation of each of these subtype-specific scores.

[0122] FIG. 28: The iBCR score associates with pCR after chemotherapy in breast cancer. Gene expression datasets with pCR annotation after chemotherapy were used as described in FIG. 5 to calculate the Agro and TN scores and the integrated iBCR score. Tumors were classified as high or low score by dichotomy across the median of each score in each dataset. (A) ER⁻HER2⁻ cases with graphs showing the percentage of cases achieving (red bars) or not achieving (black bars) pCR in low and high score subgroups. (B) ER⁺ cases were analyzed as in A. Fisher's exact test was used to analyze the 2×2 contingency tables and the p-value from this test was reported when statistical significance was observed. Each dataset is labeled with the accession number and the chemotherapy regimen used, namely: GSE18728, GSE50948, GSE20271, GSE20194, GSE22226, GSE42822 and GSE23988. Chemotherapy abbreviation: 5-FU, Adriamycin, Cyclophosphamide, Taxane, X: Xeloda, Methotrexate, Epirubicin.

[0123] FIG. 29: The iBCR score stratifies the survival of tamoxifen-treated ER+ patients. The Agro and TN scores and the iBCR score were calculated in two datasets of gene expression profiling prior to tamoxifen therapy: A&B. GSE6532 with 327 patients. 137 untreated and 190 tamoxifen-treated; C: GSE17705 with 298 patients treated with tamoxifen for 5 years. (A) ER++N0 patients with high iBCR score have poor RFS compared low iBCR score counterparts. (B) RFS of all ER+ patients and N0 and N1 subsets stratified by the Agro and iBCR scores. (C) DMFS survival of all ER+ and N0 and N1 subsets stratified by the Agro and iBCR scores. The hazard ratios and log-rank p-values are more significant for the iBCR score than the Agro score although the Agro score was significantly prognostic.

[0124] FIG. 30: Drug sensitivity of cancer cell lines according to the iBCR score. The large published study by Garnett et al. was investigated where the iBCR score was calculated for each cell line from the Agro and TN scores. The cell lines were classified as high or low iBCR score according to the median iBCR score to compare the sensitivity of low iBCR score cell lines (white boxes) and high TN score cell lines (red boxes). Results according to low and high Agro score were also included. Graphs were prepared using GraphPad® Prism and unpaired two-tailed t test was used for statistical analysis (n.s. not significant).

[0125] FIG. 31: Global gene expression meta-analysis of genes deregulated in primary breast tumors with metastatic events or death at 5 years in Oncomine™. (A) tumors with metastatic events at 5 years were compared to those with no metastatic events at 5 years in 7 datasets and (B) tumors leading to death at 5 years were compared to those that did not lead to death at 5 years were compared in 7 datasets. The datasets used in the comparisons are stated in the legends and the key for the heatmap coloring is also included. The heatmap key denotes the top or bottom x % placement of a gene according to gene rank which is based on the p-value.

[0126] FIG. 32: The TN signature outperforms all published signatures for TNBC/BLBC. Relapse-free survival of basal-like breast cancer patients (BLBC) was investigated in the online database KM-Plotter (Affymetrix platform) according to the TN signature in comparison to published TNBC signatures. Hazard ratios (HR) and logrank p-values were generated by KM-Plotter. (A) the TN score vs. signatures (B) from Karn et al. (PLoS One, 2011); from Rody et al. (Breast Cancer Res, 2011) (C) IL8, (D) VEGF, and (E) B-cell metagenes; (F) from Yau et al. (Breast Cancer Res, 2010); (G) from Yu et al. (Clin Cancer Res, 2013); (H) from Lee et al. (PLoS One, 2013 and (I) from Hallet et al. (Sci Rep, 2012).

[0127] FIG. 33: The TN score stratified the survival of ER⁻ patients in the Agilent TCGA data. The original TCGA dataset using the Agilent microarrays (n=597) were analyzed for the TN score where patients were assigned as low, intermediate or high for the TN score according to tertiles. The RFS of ER− patients only were then compared according to these tertiles. The stratification was significant according to a log-rank survival test (P<0.0001). High TN score group vs. low TN score group had a hazard ratio (95% confidence interval) of 3.484 (1.035 to 11.23) with a log rank p-value of 0.0179.

[0128] FIG. 34: The prognostication by the TN score in ER− and BLBC is not affected by systemic treatment. The online KM-Plotter tool was used to investigate the stratification of RFS, DMFS and OS of ER− breast cancer (top two rows) and BLBC (bottom two rows) in systemically untreated patients (untreated) or in patients who were treated systemically (treated). The HR, the 95% confidence intervals and the log-rank p values were provided by KM-Plotter as well as the number of patients at risk.

[0129] FIG. 35: Sensitivity of cancer cell lines to anticancer drugs according to the TN score in the Cancer Cell Line Encyclopedia (CCLE) study. The gene expression data of the cancer cell lines in the study were analyzed to calculate the TN score for each cell line and were assigned to low or high TN score by dichotomy across the median. The IC₅₀ for each of the 24 drugs used in the CCLE study was compared between high and low TN score cell lines and the data shown are those with statistical differences based on unpaired two-tailed t-test performed using GraphPad® Prism.

[0130] FIG. 36: Integration of the TN and Agro scores by addition or subtraction. The ROCK dataset was used to study the integration of the TN and Agro score with the aim to develop a test that is breast cancer subtype independent. (A) The raw Agro and TN scores for ER+ (black dots) and ER− (red dots) in the ROCK dataset (each dot represent one patient, n=1570 in total). The two scores are scattered and a method of integration that can retain the information from each score in the relevant breast cancer subtype is necessary. Such methods are tested in this Figure and FIG. 38. (B) Addition method. First column shows the TN score in ER+ tumors with low (white boxes) and high (red boxes) Agro score subgroups (top panel). In the bottom panel, the Agro score in ER− tumors with low (white boxes) and high (red boxes) TN score subgroups. This data shows that the TN score is similar for ER+ tumors with low and high Agro scores and that the Agro score is similar for ER− tumors with low and high TN scores. The lack of statistical differences (independence) suggested that integration is possible. The second column shows the linear correlation between the TN score and Agro score when they were added in each patient for ER+ (top panel) and ER− (bottom panel) patients. In the third column, the TN and Agro scores were plotted against the produced summed score showing that the information from each score is retained in the final summed score for both ER+ (top panel) and ER− (bottom panel) patients. The last column shows the overlap of data from ER+ and ER− patients shown separately in the second and third columns. (C) Identical analysis as that done in B but the integration was tested by subtraction of the TN and Agro score. The linearity of the relationship between the summed score and each of the single scores (TN and Agro score) indicated that information from each score is represented in the final score. The performance of these two methods (addition or subtraction) was tested for association with survival as shown in FIG. 37.

[0131] FIG. 37: Comparison of different integration methods of the TN and Agro scores for prognostication in ER− and ER+ RFS in the ROCK dataset. The methods of integration by addition or subtraction (from FIG. 36) or multiplication or division (FIG. 38) were tested for the association of the produced integrated score in the ROCK dataset in ER− or ER+ breast cancer. As shown in the figure, only the addition or multiplication methods were prognostic in ER− breast cancer and the multiplication was more significant in ER+ breast cancer compared to the addition. These two methods are reasonable as subtraction or division methods would reduce the value of one of the scores. Two additional methods were tested, raising one score to the power of the second score since the relationships observed when multiplication and division methods showed exponential or power curves. As shown in the last column (shaded and marked in red box), raising the TN score to the power of the Agro score should superior prognostication in both ER− and ER+ breast cancer subtypes. In fact, the prognostication of this integrated score was better than each of the score in their respective subtypes. The method was therefore used to calculate the integrated Breast Cancer Recurrence (iBCR) score.

[0132] FIG. 38: Integration of the TN and Agro scores by division or multiplication. The ROCK dataset was used to study the integration of the TN and Agro as these scores were scattered when plotted against each other (panel A in FIG. 36). (A) The box plots in the first column are identical to those in FIG. 36. The shaded boxes in panel A describe integration by division (top row) or multiplication (bottom row) of the TN and Agro scores. The division produced a power curve and the multiplication produced an exponential curve for the relationship between the TN and Agro scores after dividing them or multiplying them by each other in both ER+ (black dots) and ER− (red dots). The overlay in the last column shows that the differences between ER+ and ER− patients for the scores is retained. These two methods were tested for survival association in FIG. 37 and the multiplication method was suitable. (B) As power and exponential curves were observed in the division and multiplication methods in A, it was reasonable to test integration by raising one score to the power of the second score. As shown in the top row in the overlay or individual plots, the integration by raising the TN score to the power of the Agro score produced a linear relationship in both ER− (red dots) and ER+ (black dots) patients. This method of integration outperformed all other methods when tested for survival association as shown in FIG. 37.

[0133] FIG. 39: The iBCR score is prognostic in TNBC patients. In addition to the validation of the iBCR score in the ROCK dataset (Affymetrix) and the TCGA dataset (Illumina dataset) of mixed subtypes of breast cancer, the iBCR score was investigated in the homogenous TNBC dataset. As shown in the right panel, the iBCR was as prognostic (with slight improvement) compared to the TN score. This further validates the development of the integrated score to be a prognostic test in breast cancer irrespective of ER status, unlike previous limited signatures.

[0134] FIG. 40: Survival of tamoxifen-treated ER+ patients according to the Agro score vs. Oncotype Dx. (A) RFS and DMFS of node negative (top) and node positive (bottom) ER+ patients treated with tamoxifen in the published study (Loi et al., Clin Oncol, 2007) stratified by the Agro Score (high vs. intermediate vs. low by tertiles). (B) DMFS of node negative or positive ER+ patients treated with tamoxifen for 5 years from the published study (Symmans et al., J Clin Oncol, 2010) was stratified by the tertiles of the Agro Score. (C) RFS and DMFS of node negative (top) and node positive (bottom) ER+ patients treated with tamoxifen in the published study (Loi et al., Clin Oncol, 2007) stratified by the risk groups of the OncotypeDx Recurrence Score. (D) DMFS of node negative or positive ER+ patients treated with tamoxifen for 5 years from the published study (Symmans et al., J Clin Oncol, 2010) was stratified by the risk groups of the OncotypeDx Recurrence Score.

[0135] FIG. 41: Comparison of the Agro Score and MammaPrint in the KM-Plotter tool. Distant metastasis-free survival according to the Agro Score (high vs. low) or according to MammaPrint (high vs. low) in all breast cancer patients, ER+, ER+ lymph node negative (LN−) or ER+ lymph node positive (LN+) patients. The KM-Plotter online tool (n=4142 patients). The Agro score outperformed the MammaPrint signature in all patient subsets particularly for ER+ node positive patients.

[0136] FIG. 42: Sensitivity of cancer cell lines to anticancer drugs according to the iBCR score in the Cancer Cell Line Encyclopedia (CCLE) study. The gene expression data of the cancer cell lines in the study were analyzed to calculate the TN score for each cell line and were assigned to low or high iBCR score by dichotomy across the median. The IC₅₀ for each of the 24 drugs used in the CCLE study was compared between high and low iBCR score cell lines and the data shown are those with statistical differences based on unpaired two-tailed t-test performed using GraphPad® Prism. As this analysis was also done for the TN score (FIG. 35), results from analysis of the Agro score are also shown in the top row.

[0137] FIG. 43: High copy number variations (CNVs) in high Agro score tumors compared to low Agro score tumors. The breast cancer tumors in the TCGA dataset were classified as high or low for the Agro score based on the gene expression data (Illumina HiSeq RNA-seq). (A) The TCGA copy number variations (segmented and after deletion of germline CNV) were visualized using the UCSC Genome Browser to compare patients who were classified from gene expression data as high Agro score patients (top panel) to those classified as low Agro score patients (bottom panel). (B) Presentation of the distribution of clinical indicators such as ER, PR and HER2 status and others. (C) The difference in the CNVs profile of high Agro score patients to the low Agro score patients showing gains (red) and losses (green) of whole chromosome arms in the high Agro score patients, suggesting aneuploidy.

[0138] FIG. 44: High Agro and iBCR score cell lines are more sensitive to Aurora kinase inhibitors. Two studies which treated breast cancer cell lines with Aurora kinase inhibitors were analyzed based on the Agro, TN and the iBCR score for these cell lines. As shown in Figure, high Agro score and particularly high iBCR score cell lines were more sensitive to Aurora kinase inhibitors (ENMD-2076: IC50 1.4 μM vs. 5.9 μM for high vs. low iBCR Score cell lines, p=0.0125 t-test; AMG 900: IC50 0.3 nM vs. 0.7 nM for high vs. low iBCR score cell lines, p=0.0308 t-test).

[0139] FIG. 45: The iBCR is prognostic in the pan-cancer TCGA data for overall and relapse-free survival. The pan-cancer TCGA data were analyzed for the iBCR gene signature using the UCSC Genome Browser and the data for this signature, survival data and cancer types were downloaded from the browser. Tumors, irrespective of cancer types, were classified into quartiles based on the iBCR signature expression and the overall and relapse free survival were compared across these quartiles. As shown in the top row, overall and relapse-free survival was stratified by the iBCR signature in this pan-cancer dataset. In the far right panel in the top row, the distribution of tumors in each cancer type across the iBCR signature quartile is shown. Cervical cancer for example displays high iBCR signature in the majority of cases whereas on the opposite side, thyroid cancer displays low iBCR signature in all the cases. The lower panels show the stratification of overall survival according to the iBCR score from the pan-cancer dataset where the stratification was statistically significant in log-rank univariate survival analysis. In addition to the breast cancer data shown in paper, the iBCR signature was prognostic in adrenocortical cancer, endometrioid cancer, kidney clear cell cancer, bladder cancer, lower grade glioma and melanoma. The iBCR was also prognostic in lung adenocarcinoma as shown in FIG. 46.

[0140] FIG. 46: The iBCR signature is prognostic in lung adenocarcinoma (LUAD). The iBCR signature was tested for prognostication in lung cancer in two large datasets. (A&B) KM-Plotter (Affymetrix data) was used to investigate overall survival of lung adenocarcinoma (A) and squamous cell carcinoma (B). The iBCR signature shows a strong prognostic value in lung adenocarcinoma (LUAD). (C) Multivariate survival analysis was performed in KM-Plotter for the iBCR signature in lung cancer in comparison to available clinical indicators; histological type (lung adenocarcinoma vs. small cell lung cancer) and stage of disease. The iBCR signature outperformed these standard clinical indicators. (D&E) The TCGA data for LUAD (Illumina HiSeq RNA-seq data) were stratified by quartiles or tertiles for the iBCR signature expression to test the association of the iBCR signature with overall survival (D) and relapse-free survival (E), respectively. LUAD patients with high iBCR signature had poorest survival and suffered earlier recurrence and death compared to patients with lower iBCR signature expression. It should be noted that the TCGA data for squamous cell lung carcinoma were also investigated and there was no statistical significance for the association of the iBCR signature and survival, in agreement with the very weak association seen from the KM-Plotter data.

[0141] FIG. 47: The sensitivity of breast cancer cell lines treated with 24 drugs according to the iBCR score. Breast cancer cell lines (10 cell lines) were cultured in the absence or presence of escalating doses of 24 small molecular anti-cancer drugs. This published study was re-analyzed to compare the sensitivity (calculated as the −log IC50) between high iBCR score cell lines (5 cell lines: BT-549, MDA-MB-231, MDA-MB-436, MDA-MB-468 and BT-20) to low iBCR score cell lines (5 cell lines: Hs.578T, BT-474, MCF-7, T-47D, and ZR-75-1). The iBCR scores were calculated from the Agro and TN scores using the published gene expression dataset for 51 breast cancer cell lines (Neve et al., Cancer Cell, 2006). High iBCR score cell lines (red bars) were more sensitive than low iBCR score cell lines (white bars) to 13 drugs (shaded in grey) targeting 9 different kinases. Statistical comparison was performed in GraphPad® Prism using two tailed unpaired t-test.

[0142] FIG. 48: Proteins and phosphoproteins associated with the iBCR mRNA gene signature. The iBCR score based on the mRNA expression of the 43 genes was used to stratify the patients in the TCGA breast cancer dataset as low, intermediate or high iBCR score. The reverse phase protein arrays (RPPA) from the TCGA breast cancer dataset (n=747 patients) were then compared between the three groups of patients according to the iBCR mRNA signature. (A) Overall survival of ER+ patients according to the iBCR mRNA signature. (B) Significantly up- or down-regulated proteins and phosphoproteins in ER+ patients in the low, intermediate and high iBCR score groups. (C) Overall survival of ER− according to the iBCR mRNA signature. (D) Significantly up- or down-regulated proteins and phosphoproteins in ER− patients in the low, intermediate and high iBCR score groups.

[0143] FIG. 49: Prognostication of breast cancer patient survival by integrated mRNA and protein iBCR signature. The deregulated proteins and phosphoproteins in the three iBCR mRNA score groups were investigated for association with survival. Eight downregulated proteins and nine upregulated proteins were highly prognostic as a protein signature (iBCR protein signature). (A) Stratification of overall survival based on the iBCR protein signature (top row) and the integrated iBCR mRNA and protein signature (bottom row) in all breast cancer patients, ER+ and ER− cases. (B) Univariate and multivariate survival analysis using the Cox-proportional hazard model showing that the combined iBCR mRNA/Protein signature outperforms all clinicopathological indicators.

[0144] FIG. 50: Proteins and phosphoproteins associated with the iBCR mRNA gene signature. (A) Stratification of lung adenocarcinoma overall survival based on the iBCR mRNA gene signature in the TCGA dataset (n=472 patients). (B) Comparison of proteins phosphoprotein levels between the tumors in the four quartiles of the iBCR mRNA gene signature. (C) Stratification of overall survival of lung adenocarcinoma patients based on six proteins deduced from panel (n=212 patients). (D) The combined iBCR mRNA/Protein signature stratifies the overall survival of lung adenocarcinoma patients (n=212 patients). (E) Multivariate Cox-proportional hazard model for survival analysis showing that the combined iBCR mRNA/Protein score outperforms all clinicopathological indicators in lung adenocarcinoma.

[0145] FIG. 51: The iBCR test is prognostic in Kidney renal clear cell carcinoma (KIRC) (left vertical panel), Skin cutaneous melanoma (SKCM) (middle vertical panel) and Uterine corpus endometrioid carcinoma (UCEC) (right vertical panel). (A) Stratification of overall survival based on the iBCR mRNA gene signature. (B) Stratification of overall survival based on iBCR protein signature. (C) Stratification of overall survival based on the combined iBCR mRNA/protein signature.

[0146] FIG. 52: The iBCR test is prognostic in Ovarian adenocarcinoma (OVAC) (left vertical panel), Head & Neck squamous cell carcinoma (HNSC) (middle vertical panel) and Colon/Rectal Adenocarcinoma (COREAD) (right vertical panel). (A) Stratification of overall survival based on the iBCR mRNA gene signature. (B) Stratification of overall survival based on iBCR protein signature. (C) Stratification of overall survival based on the combined iBCR mRNA/protein signature.

[0147] FIG. 53: The iBCR test is prognostic in Lower Grade Glioma (LGG) (left vertical panel), Bladder urothelial carcinoma (BLCA) (middle vertical panel) and Lung squamous cell carcinoma (LUSC) (right vertical panel). (A) Stratification of overall survival based on the iBCR mRNA gene signature. (B) Stratification of overall survival based on iBCR protein signature. (C) Stratification of overall survival based on the combined iBCR mRNA/protein signature.

[0148] FIG. 54: The iBCR test is prognostic in (A) Kidney renal papillary cell carcinoma (KIRP). (B) Cervical squamous cell carcinoma and endocervical adenocarcinoma (CESC), (C) Liver hepatocellular carcinoma (LIHC), (D) Pancreatic ductal adenocarcinoma (PDAC). For these cancer types, the TCGA datasets did not include RPPA arrays; only the iBCR mRNA gene expression test was used.

[0149] FIG. 55: Protein-protein interaction of the iBCR mRNA/protein signature. The components of the iBCR test were analysed using the STRING database. The iBCR test (65 components) was significantly enriched (P=5.6E-14) for protein-protein interactions (129 interactions). The confidence of interactions is denoted by increasing thickness of the connecting blue lines. It is noteworthy that the components on the top right which do not show interactions contain several novel genes that are not well characterised. The iBCR test is enriched for several biological functions related to the hallmarks of cancer (refer to Table 20).

[0150] FIG. 56: The iBCR test as a companion diagnostic for immunotherapy. (A) Twelve genes from the iBCR test, particularly from the TN component, associated significantly with progression free survival of follicular lymphoma patients treated with pidilizumab+rituximab immunotherapy. The expression profile of the 12 genes in the tumours prior to treatment is shown (red indicates overexpression and green indicates underexpression). White and black boxes denote progression free survival or not, respectively. (B) A score was calculated based on the iBCR signature as the ratio of expression of the overexpressed genes to that of underexpressed genes. The survival of patients based on dichotomy across the median score was compared. The hazard ratio (HR) and the log-rank p-value for the survival comparison between low and high score tumors is shown in panel. (C) Eight patients were profiled pre- and post-treatment and the expression profiles of the 12 genes from the iBCR test were visualised in these patients. A trend for inversion of expression was observed and this was most evident for patient no. 9 who remained free of disease progression. (D) One gene was statistically significant in all patients post-treatment compared to that before treatment. This gene showed a marked different post-treatment vs. pre-treatment for patient no. 9. (E) Survival curve for the same patient group calculated from the gene signature labelled “Follicular Lymphoma” in Table 23. All conventions as per (B) above. Relapse-free survival of patients based on dichotomy across the median score is shown.

[0151] FIG. 57: Network analysis of the genes from the meta-analysis of gene expression datasets.

[0152] FIG. 58: Functional metagenes associate with breast cancer patient survival.

[0153] FIG. 59: The iBCR test as a companion diagnostic for EGFR inhibition and multikinase inhibition. (A) Seventeen genes (see Table 23) from the iBCR test associated significantly with survival of colorectal cancer patients treated with the EGFR inhibitor cetuximab. (B) Sixteen genes (see Table 23) from the iBCR test associated significantly with overall survival of triple negative breast cancer patients treated with the EGFR inhibitor cetuximab combined with cisplatin. (C) Nineteen genes (see Table 23) from the iBCR test associated significantly with progression-free survival of lung cancer patients treated with the EGFR inhibitor erlotinib. (D) Twenty genes (see Table 23) from the iBCR test associated significantly with progression-free survival of lung cancer patients treated with the multikinase inhibitor sorafenib.

### DETAILED DESCRIPTION

[0154] The present invention is at least partly predicated on the discovery that there are genes that are associated with tumor aggressiveness and poor clinical outcome based on meta-analysis of published gene expression profiling. More particularly, the overexpression and/or underexpression of these genes (see Table 21) was found to be associated with poor survival in breast cancer. Network analysis using the Ingenuity Pathway Analysis (IPA®) software identified a number of networks or metagenes within these survival-associated genes that possess distinct biological functions as outlined in Table 21. A smaller subset of genes from each network or metagene which consistently associated with patient survival were then selected. The list of these genes and their corresponding functions are shown in Table 22. These genes were divided into six functional metagenes or networks.

[0155] The present invention is also at least partly predicated on the discovery that there are genes that are commonly de-regulated in particular subgroups that exemplify aggressive clinical behavior in triple-negative breast cancer (TNBC). More particularly, this is evident in TNBC compared to non-TNBC and normal breast, tumors associated with distant metastasis and/or death compared to their respective counterparts. Initially, a list of 206 recurrently deregulated genes was found to be particularly enriched for chromosomal instability (CIN) and estrogen receptor signaling (ER) metagenes. An aggressiveness score based on the ratio of the expression level of a CIN metagene relative to an ER metagene has been shown to identify aggressive tumors regardless of molecular subtype and clinico-pathologic indicators. Furthermore, depletion of proteins involved in kinetochore binding or chromosome segregation could be therapeutic and significantly reduced the survival of TNBC cell lines in vitro, particularly with regard to TTK. TTK inhibition with small molecule inhibitor affected the survival of TNBC cell lines. Also, TTK mRNA and protein levels were associated with aggressive tumor phenotypes. Mitosis-independent expression of TTK protein was prognostic in TNBC and other aggressive breast cancer subgroups, suggesting that protection of CIN/aneuploidy drives aggressiveness and treatment-resistance. The combination of TTK inhibition with chemotherapy was effective in vitro in the treatment of cells that overexpress TTK, thus providing a therapeutic treatment for the protected CIN phenotype.

[0156] Additionally, the present invention is at least partly predicated on the discovery of a second signature of altered gene expression, including 21 overexpressed genes and 7 underexpressed genes, that is highly prognostic in patients with ER⁻ breast cancer, TNBC and basal-like breast cancer (BLBC). Indeed, integration of this 28 gene signature with the aforementioned aggressiveness score or gene signature produces an integrated score which is prognostic in breast cancer independent of ER status. Furthermore, the integrated score was prognostic in cancer broadly irrespective of the cancer type, as well as in specific types of cancer in addition to breast cancer, such as lung adenocarcinoma. Moreover, the 28 gene signature and the integrated score were both shown to be predictive of response to chemotherapy in breast cancer patients, as well as identify those ER⁺ lymph node positive breast cancer patients who would benefit from endocrine therapy. Altered expression of the signatures described herein was also predictive of sensitivity in cancer cell lines and clinically to a range of anticancer therapeutics, and in particular, molecularly targeted inhibitors.

[0157] The inventors of the present invention have also identified a protein signature that is highly prognostic in a range of cancers, including breast cancer and lung adenocarcinoma. Furthermore, this protein signature may be integrated with the aforementioned 28 gene signature and aggressive gene signature to provide a robust prognostic indicator in cancer that was shown to outperform known clinicopathological indicators.

[0158] In one aspect, the invention relates to a method of determining the aggressiveness of a cancer in a mammal, said method including the step of comparing an expression level of a plurality of overexpressed genes and an expression level of a plurality of underexpressed genes in one or more cancer cells, tissues or organs of the mammal, wherein the overexpressed genes and the underexpressed genes are from one or more metagenes selected from the group consisting of a Carbohydrate/Lipid Metabolism metagene, a Cell Signalling metagene, a Cellular Development metagene, a Cellular Growth metagene, a Chromosome Segregation metagene, a DNA Replication/Recombination metagene, an Immune System metagene, a Metabolic Disease metagene, a Nucleic Acid Metabolism metagene, a Post-Translational Modification metagene, a Protein Synthesis/Modification metagene and a Multiple Networks metagene, wherein: a higher relative expression level of the plurality of the overexpressed genes compared to the plurality of the underexpressed genes indicates or correlates with higher aggressiveness of the cancer; and/or a lower relative expression level of the plurality of the overexpressed genes compared to the plurality of the underexpressed genes indicates or correlates with lower aggressiveness of the cancer compared to a mammal having a higher expression level.

[0159] In a further aspect, the invention relates to a method of determining a cancer prognosis for a mammal, said method including the step of comparing an expression level of a plurality of overexpressed genes and an expression level of a plurality of underexpressed genes in one or more cancer cells, tissues or organs of the mammal, wherein the overexpressed genes and the underexpressed genes are from one or more metagenes selected from the group consisting of a Carbohydrate/Lipid Metabolism metagene, a Cell Signalling metagene, a Cellular Development metagene, a Cellular Growth metagene, a Chromosome Segregation metagene, a DNA Replication/Recombination metagene, an Immune System metagene, a Metabolic Disease metagene, a Nucleic Acid Metabolism metagene, a Post-Translational Modification metagene, a Protein Synthesis/Modification metagene and a Multiple Networks metagene, wherein: a higher relative expression level of the plurality of overexpressed genes compared to the plurality of underexpressed genes indicates or correlates with a less favourable cancer prognosis; and/or a lower relative expression level of the plurality of overexpressed genes compared to the plurality of underexpressed genes indicates or correlates with a more favourable cancer prognosis.

[0160] In one embodiment of the above aspects, the plurality of overexpressed genes and/or the plurality of underexpressed genes are selected from one of the metagenes. In an alternative embodiment, the plurality of overexpressed genes and/or the plurality of underexpressed genes are selected from a plurality of the metagenes.

[0161] Suitably, for the method of the above aspects the Carbohydrate/Lipid Metabolism metagene, the Cell Signalling metagene, the Cellular Development metagene, the Cellular Growth metagene, the Chromosome Segregation metagene, the DNA Replication/Recombination metagene, the Immune System metagene, the Metabolic Disease metagene, the Nucleic Acid Metabolism metagene, the Post-Translational Modification metagene, the Protein Synthesis/Modification metagene and/or the Multiple Networks metagene comprise one or more genes listed in Table 21.

[0162] In another aspect, the invention relates to a method of determining the aggressiveness of a cancer in a mammal, said method including the step of comparing an expression level of a plurality of overexpressed genes and an expression level of a plurality of underexpressed genes in one or more cancer cells, tissues or organs of the mammal, wherein the overexpressed genes and the underexpressed genes are from one or more metagenes selected from the group consisting of a Metabolism metagene, a Signalling metagene, a Development and Growth metagene, a Chromosome Segregation/Replication metagene, an Immune Response metagene and a Protein Synthesis/Modification metagene, wherein: a higher relative expression level of the plurality of the overexpressed genes compared to the plurality of the underexpressed genes indicates or correlates with higher aggressiveness of the cancer; and/or a lower relative expression level of the plurality of the overexpressed genes compared to the plurality of the underexpressed genes indicates or correlates with lower aggressiveness of the cancer compared to a mammal having a higher expression level

[0163] In yet another aspect, the invention relates to a method of determining a cancer prognosis for a mammal, said method including the step of comparing an expression level of a plurality of overexpressed genes and an expression level of a plurality of underexpressed genes in one or more cancer cells, tissues or organs of the mammal, wherein the overexpressed genes and the underexpressed genes are from one or more metagenes selected from the group consisting of a Metabolism metagene, a Signalling metagene, a Development and Growth metagene, a Chromosome Segregation/Replication metagene, an Immune Response metagene and a Protein Synthesis/Modification metagene, wherein: a higher relative expression level of the plurality of overexpressed genes compared to the plurality of underexpressed genes indicates or correlates with a less favourable cancer prognosis; and/or a lower relative expression level of the plurality of overexpressed genes compared to the plurality of underexpressed genes indicates or correlates with a more favourable cancer prognosis.

[0164] Suitably, the Metabolism metagene, the Signalling metagene, the Development and Growth metagene, the Chromosome Segregation/Replication metagene, the Immune Response metagene and/or the Protein Synthesis/Modification metagene comprise one or more genes listed in Table 21.

[0165] In particular embodiments of the method of the two aforementioned aspects, the plurality of overexpressed genes and the plurality of underexpressed genes are from one or more of a Carbohydrate/Lipid Metabolism metagene, a Cell Signalling metagene, a Cellular Development metagene, a Cellular Growth metagene, a Chromosome Segregation metagene, a DNA Replication/Recombination metagene, an Immune System metagene, a Metabolic Disease metagene, a Nucleic Acid Metabolism metagene, a Post-Translational Modification metagene, a Protein Synthesis/Modification metagene and a Multiple Networks metagene. According to the method of the above aspects, the step of comparing an expression level of a plurality of overexpressed genes and an expression level of a plurality of underexpressed genes includes comparing an average expression level of the plurality of overexpressed genes and an average expression level of the plurality of underexpressed genes. This may include calculating a ratio of the average expression level of the plurality of overexpressed genes and the average expression level of the plurality of underexpressed genes. Suitably, the ratio provides an aggressiveness score which is indicative of, or correlates with, cancer aggressiveness and a less favourable prognosis. Alternatively, the step of comparing an expression level of a plurality of overexpressed genes and an expression level of a plurality of underexpressed genes includes comparing the sum of expression levels of the plurality of overexpressed genes and the sum of expression levels of the plurality of underexpressed genes. This may include calculating a ratio of the sum of expression levels of the plurality of overexpressed genes and the sum of expression levels of the plurality of underexpressed genes.

[0166] For the purposes of this invention, by “isolated” is meant material that has been removed from its natural state or otherwise been subjected to human manipulation. Isolated material may be substantially or essentially free from components that normally accompany it in its natural state, or may be manipulated so as to be in an artificial state together with components that normally accompany it in its natural state. Isolated material may be in native, chemical synthetic or recombinant form.

[0167] As used herein a “gene” is a nucleic acid which is a structural, genetic unit of a genome that may include one or more amino acid-encoding nucleotide sequences and one or more non-coding nucleotide sequences inclusive of promoters and other 5′ untranslated sequences, introns, polyadenylation sequences and other 3′ untranslated sequences, although without limitation thereto. In most cellular organisms a gene is a nucleic acid that comprises double-stranded DNA.

[0168] Non-limiting examples of genes are set forth herein, particularly in Tables 4, 21 and 22, which include Accession Numbers referencing the nucloetide sequence of the gene, or its encoded protein, as are well understood in the art.

[0169] The term “nucleic acid” as used herein designates single- or double-stranded DNA and RNA. DNA includes genomic DNA and cDNA. RNA includes mRNA, RNA, RNAi, siRNA, cRNA and autocatalytic RNA. Nucleic acids may also be DNA-RNA hybrids. A nucleic acid comprises a nucleotide sequence which typically includes nucleotides that comprise an A, G, C, T or U base. However, nucleotide sequences may include other bases such as inosine, methylycytosine, methylinosine, methyladenosine and/or thiouridine, although without limitation thereto.

[0170] Also included are, “variant” nucleic acids that include nucleic acids that comprise nucleotide sequences of naturally occurring (e.g., allelic) variants and orthologs (e.g., from a different species). Preferably, nucleic acid variants share at least 70% or 75%, preferably at least 80% or 85% or more preferably at least 90%, 91%, 92%, 93%, 94%, 95%, 96%, 97%, 98% or 99% sequence identity with a nucleotide sequence disclosed herein.

[0171] Also included are nucleic acid fragments. A “fragment” is a segment, domain, portion or region of a nucleic acid, which respectively constitutes less than 100% of the nucleotide sequence. A non-limilting example is an amplification product or a primer or probe. In particular embodiments, a nucleic acid fragment may comprise, for example, at least 10, 15, 20, 25, 30 35, 40, 45, 50, 55, 60, 65, 70, 75, 80, 85, 90, 95, 100, 125, 150, 175, 200, 225, 250, 275, 300, 325, 350, 375, 400, 425, 450, 475 and 500 contiguous nucleotides of said nucleic acid.

[0172] As used herein, a “polynucleotide” is a nucleic acid having eighty (80) or more contiguous nucleotides, while an “oligonucleotide” has less than eighty (80) contiguous nucleotides. A “probe” may be a single or double-stranded oligonucleotide or polynucleotide, suitably labeled for the purpose of detecting complementary sequences in Northern or Southern blotting, for example. A “primer” is usually a single-stranded oligonucleotide, preferably having 15-50 contiguous nucleotides, which is capable of annealing to a complementary nucleic acid “template” and being extended in a template-dependent fashion by the action of a DNA polymerase such as Taq polymerase, RNA-dependent DNA polymerase or Sequenase™. A “template” nucleic acid is a nucleic acid subjected to nucleic acid amplification.

[0173] It will be appreciated that the “overexpressed” genes or proteins referred to herein are genes or proteins that are expressed at a higher level in a cancer cell or tissue compared to a corresponding normal or otherwise non-cancerous cell or tissue or reference/control level or sample.

[0174] It will be appreciated that the “underexpressed” genes or proteins referred to herein are genes or proteins that are expressed at a lower level in a cancer cell or tissue compared to a corresponding normal or otherwise non-cancerous cell or tissue or reference/control level or sample.

[0175] In certain embodiments, the “overexpressed” and “underexpressed” genes referred to herein may form, or be components of, a metagene.

[0176] As used herein, a “metagene” is a grouping, cohort or network of a plurality of different genes that display a common, shared or aggregate expression profile, expression level or other expression characteristics that associate with, or are indicative of, a particular function or phenotype. Non-limiting examples include a Carbohydrate/Lipid Metabolism metagene, a Cell Signalling metagene, a Cellular Development metagene, a Cellular Growth metagene, a Chromosome Segregation metagene, a DNA Replication/Recombination metagene, an Immune System metagene, a Metabolic Disease metagene, a Nucleic Acid Metabolism metagene, a Post-Translational Modification metagene, a Protein Synthesis/Modification metagene and a Multiple Networks metagene. Table 21 provides non-limiting examples of genes that are components of the aforementioned twelve metagenes. Further non-limiting examples include a Metabolism metagene, a Signalling metagene, a Development and Growth metagene, a Chromosome Segregation/Replication metagene, an Immune Response metagene and a Protein Synthesis/Modification metagene. Table 22 provides non-limiting examples of genes that are components of the aforementioned six metagenes.

[0177] In particular embodiments, the plurality of overexpressed genes and/or the plurality of underexpressed genes are selected from one of the metagenes. In this regard, the plurality of overexpressed genes and/or the plurality of underexpressed genes are selected from the same metagene. By way of example, the plurality of overexpressed genes or the plurality of underexpressed genes may be only from one of the Carbohydrate/Lipid Metabolism metagene, the Cell Signalling metagene, the Cellular Development metagene, the Cellular Growth metagene, the Chromosome Segregation metagene, the DNA Replication/Recombination metagene, the Immune System metagene, the Metabolic Disease metagene, the Nucleic Acid Metabolism metagene, the Post-Translational Modification metagene, the Protein Synthesis/Modification metagene and the Multiple Networks metagene. In a further example, both the plurality of overexpressed genes and the plurality of underexpressed genes may be only from one of the Carbohydrate/Lipid Metabolism metagene, the Cell Signalling metagene, the Cellular Development metagene, the Cellular Growth metagene, the Chromosome Segregation metagene, the DNA Replication/Recombination metagene, the Immune System metagene, the Metabolic Disease metagene, the Nucleic Acid Metabolism metagene, the Post-Translational Modification metagene, the Protein Synthesis/Modification metagene and the Multiple Networks metagene.

[0178] Alternatively, the plurality of overexpressed genes and/or the plurality of underexpressed genes are selected from a plurality of the metagenes described herein.

[0179] By “aggressiveness” and “aggressive” is meant a property or propensity for a cancer to have a relatively poor prognosis due to one or more of a combination of features or factors including: at least partial resistance to therapies available for cancer treatment; invasiveness; metastatic potential; recurrence after treatment; and a low probability of patient survival, although without limitation thereto.

[0180] Cancers may include any aggressive or potentially aggressive cancers, tumours or other malignancies such as listed in the NCI Cancer Index at http://www.cancer.gov/cancertopics/alphalist, including all major cancer forms such as sarcomas, carcinomas, lymphomas, leukaemias and blastomas, although without limitation thereto. These may include breast cancer, lung cancer inclusive of lung adenocarcinoma, cancers of the reproductive system inclusive of ovarian cancer, cervical cancer, uterine cancer and prostate cancer, cancers of the brain and nervous system, head and neck cancers, gastrointestinal cancers inclusive of colon cancer, colorectal cancer and gastric cancer, liver cancer, kidney cancer, skin cancers such as melanoma and skin carcinomas, blood cell cancers inclusive of lymphoid cancers and myelomonocytic cancers, cancers of the endocrine system such as pancreatic cancer and pituitary cancers, musculoskeletal cancers inclusive of bone and soft tissue cancers, although without limitation thereto.

[0181] In certain embodiments, cancers include breast cancer, bladder cancer, colorectral cancer, glioblastoma, lower grade glioma, head & neck cancer, kidney cancer, liver cancer, lung adenocarcinoma, acute myeloid leukaemia, pancreatic cancer, adrenocortical cancer, melanoma and lung squamous cell carcinoma.

[0182] Breast cancers include all aggressive breast cancers and cancer subtypes such as triple negative breast cancer, grade 2 breast cancer, grade 3 breast cancer, lymph node positive (LN⁺) breast cancer, HER2 positive (HER2⁺) breast cancer and ER positive (ER⁺) breast cancer, although without limitation thereto.

[0183] As used herein, “triple negative breast cancer” (TNBC) is an often aggressive breast cancer subtype lacking or having significantly reduced expression of estrogen receptor (ER) protein, progesterone receptor (PR) protein and HER2 protein. TNBC and other aggressive breast cancers are typically insensitive to some of the most effective therapies available for breast cancer treatment including HER2-directed therapy such as trastuzumab and endocrine therapies such as tamoxifen and aromatase inhibitors.

[0184] As used herein, a gene expression level may be an absolute or relative amount of an expressed gene or gene product inclusive of nucleic acids such as RNA, mRNA and cDNA and protein.

[0185] As would be appreciated by the skilled artisan, the present invention need not be limited to comparing the expression level of the overexpressed genes and/or proteins with the expression level of the underexpressed genes and/or proteins provided herein. Accordingly, in particular embodiments, the expression level of the overexpressed and/or underexpressed genes and/or proteins is compared to a control level of expression, such as the level of gene and/or protein expression of a “housekeeping” gene in one or more cancer cells, tissues or organs of the mammal.

[0186] In further embodiments, the expression level of the overexpressed and/or underexpressed genes and/or proteins is compared to a threshold level of expression, such as a level of gene and/or protein expression in non-aggressive cancerous tissue. A threshold level of expression is generally a quantified level of expression of a particular gene or set of genes, including gene products thereof. Typically, an expression level of a gene or set of genes in a sample that exceeds or falls below the threshold level of expression is predictive of a particular disease state or outcome. The nature and numerical value (if any) of the threshold level of expression will vary based on the method chosen to determine the expression the one or more genes or proteins used in determining, for example, a prognosis, the aggressiveness and/or response to anticancer therapy, in the mammal. In light of this disclosure, any person of skill in the art would be capable of determining the threshold level of gene/protein expression in a mammal sample that may be used in determining, for example, a prognosis, the aggressiveness and/or response to anticancer therapy, using any method of measuring gene or protein expression known in the art, such as those described herein. In one embodiment, the threshold level is a mean and/or median to expression level (median or absolute) of the overexpressed and/or underexpressed genes and/or proteins in a reference population, that, for example, have the same cancer type, subgroup, stage and/or grade as said mammal for which the expression level is determined. Additionally, the concept of a threshold level of expression should not be limited to a single value or result. In this regard, a threshold level of expression may encompass multiple threshold expression levels that could signify, for example, a high, medium, or low probability of, for example, progression free survival.

[0187] By “protein” is meant an amino acid polymer. The amino acids may be natural or non-natural amino acids, D- or L-amino acids as are well understood in the art. As would be appreciated by the skilled person, the term “protein” also includes within its scope phosphorylated forms of a protein (i.e., phosphoproteins).

[0188] Also provided are protein “variants” such as naturally occurring (eg allelic variants) and orthologs. Preferably, protein variants share at least 70% or 75%, preferably at least 80% or 85% or more preferably at least 90%, 91%, 92%, 93%, 94%, 95%, 96%, 97%, 98% or 99% sequence identity with an amino acid sequence disclosed herein.

[0189] Also provided are protein fragments, inclusive of peptide fragments thqat comprise less than 100% of an entire amino acid sequence. In particular embodiments, a protein fragment may comprise, for example, at least 10, 15, 20, 25, 30 35, 40, 45, 50, 55, 60, 65, 70, 75, 80, 85, 90, 95, 100, 125, 150, 175, 200, 225, 250, 275, 300, 325, 350, 375 and 400 contiguous amino acids of said protein.

[0190] A “peptide” is a protein having no more than fifty (50) amino acids.

[0191] A “polypeptide” is a protein having more than fifty (50) amino acids.

[0192] It would be appreciated that in addition to comparing the expression levels of one or more genes or proteins, the methods of the present invention may further include the step of determining, assessing, evaluating, assaying or measuring the expression level of one or more of the overexpressed genes, the underexpressed genes, the overexpressed proteins and/or the underexpressed proteins described herein. The terms “determining”, “measuring”, “evaluating”, “assessing” and “assaying” are used interchangeably herein and may include any form of measurement known in the art, such as those described hereinafter.

[0193] Determining, assessing, evaluating, assaying or measuring nucleic acids such as RNA, mRNA and cDNA may be performed by any technique known in the art. These may be techniques that include nucleic acid sequence amplification, nucleic acid hybridization, nucleotide sequencing, mass spectroscopy and combinations of any these.

[0194] Nucleic acid amplification techniques typically include repeated cycles of annealing one or more primers to a “template” nucleotide sequence under appropriate conditions and using a polymerase to synthesize a nucleotide sequence complementary to the target, thereby “amplifying” the target nucleotide sequence. Nucleic acid amplification techniques are well known to the skilled addressee, and include but are not limited to polymerase chain reaction (PCR); strand displacement amplification (SDA); rolling circle replication (RCR); nucleic acid sequence-based amplification (NASBA), Q-β replicase amplification; helicase-dependent amplification (HAD); loop-mediated isothermal amplification (LAMP); nicking enzyme amplification reaction (NEAR) and recombinase polymerase amplification (RPA), although without limitation thereto. As generally used herein, an “amplification product” refers to a nucleic acid product generated by a nucleic acid amplification technique.

[0195] PCR includes quantitative and semi-quantitative PCR, real-time PCR, allele-specific PCR, methylation-specific PCR, asymmetric PCR, nested PCR, multiplex PCR, touch-down PCR and other variations and modifications to “basic” PCR amplification.

[0196] Nucleic acid amplification techniques may be performed using DNA or RNA extracted, isolated or otherwise obtained from a cell or tissue source. In other embodiments, nucleic acid amplification may be performed directly on appropriately treated cell or tissue samples.

[0197] Nucleic acid hybridization typically includes hybridizing a nucleotide sequence (typically in the form of a probe) to a target nucleotide sequence under appropriate conditions, whereby the hybridized probe-target nucleotide sequence is subsequently detected. Non-limiting examples include Northern blotting, slot-blotting, in situ hybridization and fluorescence resonance energy transfer (FRET) detection, although without limitation thereto. Nucleic acid hybridization may be performed using DNA or RNA extracted, isolated, amplified or otherwise obtained from a cell or tissue source or directly on appropriately treated cell or tissue samples.

[0198] It will also be appreciated that a combination of nucleic acid amplification and nucleic acid hybridization may be utilized.

[0199] Determining, assessing, evaluating, assaying or measuring protein levels may be performed by any technique known in the art that is capable of detecting cell- or tissue-expressed proteins whether on the cell surface or intracellularly expressed, or proteins that are isolated, extracted or otherwise obtained from the cell of tissue source. These techniques include antibody-based detection that uses one or more antibodies which bind the protein, electrophoresis, isoelectric focussing, protein sequencing, chromatographic techniques and mass spectroscopy and combinations of these, although without limitation thereto. Antibody-based detection may include flow cytometry using fluorescently-labelled antibodies that bind the protein, ELISA, immunoblotting, immunoprecipitation, in situ hybridization, immunohistochemistry and immuncytochemistry, although without limitation thereto. Suitable techniques may be adapted for high throughput and/or rapid analysis such as using protein arrays such as a TissueMicroArray™ (TMA), MSD MultiArrays™ and multiwell ELISA, although without limitation thereto.

[0200] In certain embodiments, a gene expression level may be assessed indirectly by the measurement of a non-coding RNA, such as miRNA, that regulate gene expression. MicroRNAs (miRNAs or miRs) are post-transcriptional regulators that bind to complementary sequences in the 3′ untranslated regions (3′ UTRs) of target mRNA transcripts, usually resulting in gene silencing. miRNAs are short RNA molecules, on average only 22 nucleotides long. The human genome may encode over 1000 miRNAs, which may target about 60% of mammalian genes and are abundant in many human cell types. Each miRNA may alter the expression of hundreds of individual mRNAs. In particular, miRNAs may have multiple roles in negative regulation (e.g., transcript degradation and sequestering, translational suppression) and/or positive regulation (e.g., transcriptional and translational activation). Additionally, aberrant miRNA expression has been implicated in various types of cancer.

[0201] In this regard, an average expression level, or alternatively a sum of the expression levels, may be calculated for the plurality of overexpressed genes and for the plurality of underexpressed genes, to thereby produce or calculate a ratio.

[0202] Accordingly, determining cancer aggressiveness and/or a prognosis for a cancer patient in certain embodiments of the present invention further includes determining the ratio of the expression level (e.g. an average or sum of the expression level) of the plurality of overexpressed genes to the expression level (e.g. an average or sum of the expression level) of the plurality of underexpressed genes.

[0203] In another aspect of the invention relates to a method of determining the aggressiveness of a cancer in a mammal, said method including the step of comparing an expression level of a plurality of overexpressed genes associated with chromosomal instability and an expression level of a plurality of underexpressed genes associated with estrogen receptor signalling in one or more cancer cells, tissues or organs of the mammal, wherein: a higher relative expression level of the plurality of overexpressed genes associated with chromosomal instability compared to the plurality of underexpressed genes associated with estrogen receptor signalling indicates or correlates with higher aggressiveness of the cancer; and/or a lower relative expression level expression level of the plurality of overexpressed genes associated with chromosomal instability compared to the plurality of underexpressed genes associated with estrogen receptor signalling indicates or correlates with lower aggressiveness of the cancer compared to a mammal having a higher expression level.

[0204] In yet another aspect of the invention relates to a method of determining a cancer prognosis for a mammal, said method including the step of comparing an expression level of a plurality of overexpressed genes associated with chromosomal instability and an expression level of a plurality of underexpressed genes associated with estrogen receptor signalling in the mammal, wherein: a higher relative expression level of the plurality of overexpressed genes associated with chromosomal instability compared to the plurality of underexpressed genes associated with estrogen receptor signalling indicates or correlates with a less favourable cancer prognosis; and/or a lower relative expression level of the plurality of overexpressed genes associated with chromosomal instability compared to the plurality of underexpressed genes associated with estrogen receptor signalling indicates or correlates with a more favourable cancer prognosis.

[0205] Non-limiting examples of genes in a chromosomal instability (CIN) metagene include ATP6V1C1, RAP2A, CALM1, COG8, HELLS, KDM5A, PGK1, PLCH1, CEP55, RFC4, TAF2, SF3B3, GP1, PIR, MCM10, MELK, FOXM1, KIF2C, NUP155, TPX2, TTK, CENPA, CENPN, EXO1, MAPRE1, ACOT7, NAE1, SHMT2, TCP1, TXNRD1, ADM, CHAF1A and SYNCRIP genes, although without limitation thereto; and an estrogen receptor signalling (ER) metagene may comprise BTG2, PIK3IP1, SEC14L2, FLNB, ACSF2, APOM, BIN3, GLTSCR2, ZMYND10, ABAT, BCAT2, SCUBE2, RUNX1, LRRC48, MYBPC1, BCL2, CHPT1, ITM2A, LRIG1, MAPT, PRKCB, RERE, ABHD14A, FLT3, TNN, STC2, BATF, CD1E, CFB, EVL, FBXW4, ABCB1, ACAA1, CHAD, PDCD4, RPL10, RPS28, RPS4X, RPS6, SORBS1, RPL22 and RPS4XP3 genes, although without limitation thereto. Table 4 provides further examples of genes that are components of a CIN metagene or that are components of an ER metagene.

[0206] An average expression level may be calculated for the CIN metagene and for the ER metagene, to thereby produce or calculate a ratio.

[0207] Alternatively, a sum of expression levels may be calculated for the CIN metagene and for the ER metagene, to thereby produce or calculate a ratio.

[0208] In certain embodiments, a higher or increased ratio of the average or sum of expression levels of a CIN metagene relative to an ER metagene is associated with, correlates with or is indicative of, higher or increased cancer aggressiveness.

[0209] Thus, some embodiments of the invention provide an “aggressiveness score” which is the ratio of CIN metagene expression level (e.g. average or sum of expression of CIN genes) to an ER metagene expression level (e.g average or sum of expression of ER genes).

[0210] Accordingly, embodiments of the aforementioned aspects of the invention include determining, assessing or measuring an expression level of a plurality of overexpressed genes associated with chromosomal instability and determining, assessing or measuring an expression level of a plurality of underexpressed genes associated with estrogen receptor signalling. In this regard, reference is made to Table 4 which provides a listing of 206 genes that include genes associated with chromosomal instability and genes associated with estrogen receptor signalling. Preferably, the chromosomal instability genes are of a CIN metagene, comprising genes such as ATP6V1C1, RAP2A, CALM1, COG8, HELLS, KDM5A, PGK1, PLCH1, CEP55, RFC4, TAF2, SF3B3, GP1, PIR, MCM10, MELK, FOXM1, KIF2C, NUP155, TPX2, 11K, CENPA, CENPN, EXO1, MAPRE1, ACOT7, NAE1, SHMT2, TCP1, TXNRD1, ADM, CHAF1A and SYNCRIP, although without limitation thereto. In one preferred embodiment, the chromosomal instability genes are selected from the group consisting of MELK, MCM10, CENPA, EXO1, TTK and KIF2C. Preferably, the estrogen receptor signalling genes are of an ER metagene comprising genes such as BTG2, PIK3IP1, SEC14L2, FLNB, ACSF2, APOM, BIN3, GLTSCR2, ZMYND10, ABAT, BCAT2, SCUBE2, RUNX1, LRRC48, MYBPC1, BCL2, CHPT1, ITM2A, LRIG1, MAPT, PRKCB, RERE, ABHD14A, FLT3, TNN, STC2, BATF, CD1E, CFB, EVL, FBXW4, ABCB1, ACAA1, CHAD, PDCD4, RPL10, RPS28, RPS4X, RPS6, SORBS1, RPL22 and RPS4XP3, although without limitation thereto. In one preferred embodiment, the estrogen receptor signalling genes are selected from the group consisting of MAPT and MYB.

[0211] In certain embodiments, the method of the aforementioned two aspects further includes the step of comparing an expression level of one or more other overexpressed genes selected from the group consisting of CAMSAP1, CETN3, GRHPR, ZNF593, CA9, CFDP1, VPS28, ADORA2B, GSK3B, LAMA4, MAP2K5, HCFC1R1, KCNG1, BCAP31, ULBP2, CARHSP1, PML, CD36, CD55, GEMIN4, TXN, ABHD5, EIF3K, EIF4B, EXOSC7, GNB2L1, LAMA3, NDUFC1 and STAU1, and an expression level of one or more other underexpressed genes selected from the group consisting of BRD8, BTN2A2. KIR2DL4. ME1, PSEN2, CALR, CAMK4, ITM2C, NOP2, NSUN5, SF3B1, ZNRD1-AS1, ARNT2, ERC2, SLC11A1, BRD4, APOBEC3A, CD1A, CD1B, CD1C, CXCR4, HLA-B, IGH, KIR2DL3, SMPDL3B, MYB, RLN1, MTMR7, SORBS1 and SRPK3, in one or more cancer cells, tissues or organs of the mammal, wherein: a higher relative expression level of the one or more other overexpressed genes compared to the one or more other underexpressed genes indicates or correlates with higher aggressiveness of the cancer and/or a less favourable cancer prognosis; and/or a lower relative expression level of the one or more other overexpressed genes compared to the one or more other underexpressed genes indicates or correlates with lower aggressiveness of the cancer and/or a more favourable cancer prognosis compared to a mammal having a higher expression level.

[0212] In one embodiment, the one or more other overexpressed genes are selected from the group consisting of ABHD5, ADORA2B, BCAP31, CA9, CAMSAP1, CARHSP1, CD55, CETN3, EIF3K, EXOSC7, GNB2L1, GRHPR, GSK3B, HCFC1R1, KCNG1, MAP2K5, NDUFC1, PML, STAU1, TXN and ZNF593.

[0213] In one embodiment, the one or more other underexpressed genes are selected from the group consisting of BTN2A2, ERC2, IGH, ME1, MTMR7, SMPDL3B and ZNRD1-AS1.

[0214] In this regard, an average expression level, or alternatively a sum of the expression levels, may be calculated for the one or more other overexpressed genes and for the one or more other underexpressed genes, to thereby produce or calculate a ratio.

[0215] Accordingly, determining cancer aggressiveness and/or a prognosis for a cancer patient in certain embodiments of the present invention further includes determining the ratio of the expression level (e.g. an average or sum of the expression level) of the one or more other overexpressed genes to the expression level (e.g. an average or sum of the expression level) of the one or more other underexpressed genes.

[0216] Detection and/or measurement of expression of the one or more other overexpressed genes and the one or more other underexpressed genes may be performed by any of those methods or combinations thereof described herein (e.g measuring mRNA levels or an amplified cDNA copy thereof and/or by measuring a protein product thereof), albeit without limitation thereto.

[0217] Suitably, the comparison of the expression level of the plurality of overexpressed genes associated with chromosomal instability and the expression level of the plurality of underexpressed genes associated with estrogen receptor signalling is integrated with the comparison of the expression level of the one or more other overexpressed genes and the expression level of the one or more other underexpressed genes to derive a first integrated score. In particular embodiments, this may include deriving the first integrated score, at least in part, by addition, subtraction, multiplication, division and/or exponentiation.

[0218] By way of example, the comparison of the expression level of the plurality of overexpressed genes associated with chromosomal instability and the expression level of the plurality of underexpressed genes associated with estrogen receptor signalling may be added to, subtracted from, multiplied by, divided by and/or raised to the power of the comparison of the expression level of the one or more other overexpressed genes and the expression level of the one or more other underexpressed genes to derive the first integrated score. Alternatively, the comparison of the expression level of the one or more other overexpressed genes and the expression level of the one or more other underexpressed genes may be added to, subtracted from, multiplied by, divided by and/or raised to the power of the comparison of the expression level of the plurality of overexpressed genes associated with chromosomal instability and the expression level of the plurality of underexpressed genes associated with estrogen receptor signalling to derive the first integrated score.

[0219] In a particular preferred embodiment, the first integrated score is derived by exponentiation, wherein the comparison of the expression level of the one or more other overexpressed genes and the expression level of the one or more other underexpressed genes is raised to the power of the comparison of the expression level of the plurality of overexpressed genes associated with chromosomal instability and the expression level of the plurality of underexpressed genes associated with estrogen receptor signalling.

[0220] As would be appreciated by the skilled person, the other overexpressed and underexpressed genes described herein may not necessarily be associated with chromosomal instability and estrogen receptor signalling respectively.

[0221] In a further aspect, the invention provides a method of determining the aggressiveness of a cancer in a mammal, said method including the step of comparing an expression level of one or more overexpressed genes, wherein the one or more overexpressed genes are selected from the group consisting of CAMSAP1, CETN3, GRHPR, ZNF593, CA9, CFDP1, VPS28, ADORA2B, GSK3B, LAMA4, MAP2K5, HCFC1R1, KCNG1, BCAP31, ULBP2, CARHSP1, PML, CD36, CD55, GEMIN4, TXN, ABHD5, EIF3K, EIF4B, EXOSC7, GNB2L1, LAMA3, NDUFC1 and STAU1, and an expression level of one or more underexpressed genes, wherein the one or more underexpressed genes are selected from the group consisting of BRD8, BTN2A2. KIR2DL4. ME1, PSEN2, CALR, CAMK4, ITM2C, NOP2, NSUN5, SF3B1, ZNRD1-AS1, ARNT2, ERC2, SLC11A1, BRD4, APOBEC3A, CD1A, CD1B, CD1C, CXCR4, HLA-B, IGH, KIR2DL3, SMPDL3B, MYB, RLN1, MTMR7, SORBS1 and SRPK3, in one or more cancer cells, tissues or organs of the mammal, wherein: a higher relative expression level of the one or more overexpressed genes compared to the one or more underexpressed genes indicates or correlates with higher aggressiveness of the cancer; and/or a lower relative expression level of the one or more overexpressed genes compared to the one or more underexpressed genes indicates or correlates with lower aggressiveness of the cancer compared to a mammal having a higher expression level.

[0222] In one embodiment, the one or more overexpressed genes are selected from the group consisting of ABHD5, ADORA2B, BCAP31, CA9, CAMSAP1, CARHSP1, CD55, CETN3, EIF3K, EXOSC7, GNB2L1, GRHPR, GSK3B, HCFC1R1, KCNG1, MAP2K5, NDUFC1, PML, STAU1, TXN and ZNF593.

[0223] In one embodiment, the one or more underexpressed genes are selected from the group consisting of BTN2A2, ERC2, IGH, ME1, MTMR7, SMPDL3B and ZNRD1-AS1.

[0224] In yet another aspect, the invention provides a method of determining a cancer prognosis for a mammal, said method including the step of comparing an expression level of one or more overexpressed genes, wherein the one or more overexpressed genes are selected from the group consisting of CAMSAP1, CETN3, GRHPR, ZNF593, CA9, CFDP1, VPS28, ADORA2B, GSK3B, LAMA4, MAP2K5, HCFC1R1, KCNG1, BCAP31, ULBP2, CARHSP1, PML, CD36, CD55, GEMIN4, TXN, ABHD5, EIF3K, EIF4B, EXOSC7, GNB2L1, LAMA3, NDUFC1 and STAU1, and an expression level of one or more underexpressed genes, wherein the one or more underexpressed genes are selected from the group consisting of BRD8, BTN2A2. KIR2DL4. ME1, PSEN2, CALR, CAMK4, ITM2C, NOP2, NSUN5, SF3B1, ZNRD1-AS1, ARNT2, ERC2, SLC11A1, BRD4, APOBEC3A, CD1A, CD1B, CD1C, CXCR4, HLA-B, IGH, KIR2DL3, SMPDL3B, MYB, RLN1, MTMR7, SORBS1 and SRPK3, in one or more cancer cells, tissues or organs of the mammal, wherein: a higher relative expression level of the one or more overexpressed genes compared to the one or more underexpressed genes indicates or correlates with a less favourable cancer prognosis; and/or a lower relative expression level of the one or more overexpressed genes compared to the one or more underexpressed genes indicates or correlates with a more favourable cancer prognosis compared to a mammal having a higher expression level.

[0225] In one embodiment, the one or more overexpressed genes are selected from the group consisting of ABHD5, ADORA2B, BCAP31, CA9, CAMSAP1, CARHSP1, CD55, CETN3, EIF3K, EXOSC7, GNB2L1, GRHPR, GSK3B, HCFC1R1, KCNG1, MAP2K5, NDUFC1, PML, STAU1, TXN and ZNF593.

[0226] In one embodiment, the one or more underexpressed genes are selected from the group consisting of BTN2A2, ERC2, IGH, ME1, MTMR7, SMPDL3B and ZNRD1-AS1.

[0227] In particular embodiments, the method of the aforementioned aspects further includes the step of comparing an expression level of one or more overexpressed proteins selected from the group consisting of DVL3, PAI-1, VEGFR2, INPP4B, EIF4EBP1, EGFR, Ku80, HER3, SMAD1, GATA3, ITGA2, AKT1, NFKB1, HER2, ASNS and COL6A1, and an expression level of one or more underexpressed proteins selected from the group consisting of VEGFR2, HER3, ASNS, MAPK9, ESR1, YWHAE, RAD50, PGR, COL6A1, PEA15 and RPS6, in one or more cancer cells, tissues or organs of the mammal, wherein: a higher relative expression level of the one or more overexpressed proteins compared to the one or more underexpressed proteins indicates or correlates with higher aggressiveness of the cancer and/or a less favourable cancer prognosis; and/or a lower relative expression level of the one or more overexpressed proteins compared to the one or more underexpressed proteins indicates or correlates with lower aggressiveness of the cancer and/or a more favourable cancer prognosis compared to a mammal having a higher expression level.

[0228] As would be appreciated by the skilled artisan, the expression level of one or more of the overexpressed proteins and/or one or more of the underexpressed proteins described herein may include one or more phosphorylated forms of said proteins (i.e., a phosphoprotein). In one embodiment, EIF4EBP1 is or comprises one or more phosphoproteins selected from the group consisting of pEIF4EBP1^{S65}, pEIF4EBP1^{T37}, pEIF4EBP1^{T46} and pEIF4EBP1^{T70}. In one embodiment, EGFR is or comprises one or more phosphoproteins selected from the group consisting of pEGFR^{Y1068} and pEGFR^{Y1173}. In one embodiment, HER3 is or comprises pHER3^{Y1289}. In one embodiment, AKT1 is or comprises one or more phosphoproteins selected from the group consisting of pAKT1^{S473} and pAKT1^{T308}. In one embodiment, NFKB1 is or comprises pNFKB1^{S536} In one embodiment, HER2 is or comprises pHER2^{Y1248}. In one embodiment, ESR1 is or comprises pESR1^{S118}. In one embodiment, PEA15 is or comprises pPEA15^{S116}. In one embodiment, RPS6 is or comprises one or more phosphoproteins selected from the group consisting of pRPS6^{S235}, pRPS6^{S236}, pRPS6^{S240} and pRPS6^{S244}.

[0229] An average or sum of the expression levels may be calculated for the overexpressed genes, the underexpressed genes, the overexpressed proteins and/or the underexpressed proteins, to thereby produce or calculate a ratio.

[0230] Thus, in certain embodiments of the present invention determining cancer aggressiveness and/or a prognosis for a cancer patient includes determining (i) the ratio of the expression level (e.g. an average or sum of the expression level) of the one or more overexpressed genes to the expression level (e.g. an average or sum of the expression level) of the one or more underexpressed genes; and/or (ii) the ratio of the expression level (e.g. an average or sum of the expression level) of the one or more overexpressed proteins to the expression level (e.g. an average or sum of the expression level) of the one or more underexpressed proteins.

[0231] Detection and/or measurement of expression of the overexpressed proteins and the underexpressed proteins may be performed by any of those methods or combinations thereof hereinbefore described, albeit without limitation thereto.

[0232] Suitably, the comparison of the expression level of the one or more overexpressed proteins and the expression level of the one or more underexpressed proteins is to thereby derive an integrated score. In one particular embodiment, the comparison of the expression level of the one or more overexpressed proteins and the expression level of the one or more underexpressed proteins is integrated with:
[0233] (i) the comparison of the expression level of the overexpressed genes associated with chromosomal instability and the expression level of the underexpressed genes associated with estrogen receptor signalling to derive a second integrated score; or
[0234] (ii) the first integrated score to derive a third integrated score; or
[0235] (iii) the comparison of the expression level of the overexpressed genes selected from the group consisting of CAMSAP1, CETN3, GRHPR, ZNF593, CA9, CFDP1, VPS28, ADORA2B, GSK3B, LAMA4, MAP2K5, HCFC1R1, KCNG1, BCAP31, ULBP2, CARHSP1, PML, CD36, CD55, GEMIN4, TXN, ABHD5, EIF3K, EIF4B, EXOSC7, GNB2L1, LAMA3, NDUFC1 and STAU1 and the expression level of the underexpressed genes selected from the group consisting of BRD8, BTN2A2. KIR2DL4. ME1, PSEN2, CALR, CAMK4, ITM2C, NOP2, NSUN5, SF3B1, ZNRD1-AS1, ARNT2, ERC2, SLC11A1, BRD4, APOBEC3A, CD1A, CD1B, CD1C, CXCR4, HLA-B, IGH, KIR2DL3, SMPDL3B, MYB, RLN1, MTMR7, SORBS1 and SRPK3 to derive a fourth integrated score; or
[0236] (iv) the comparison of the expression level of the overexpressed genes and an expression level of the underexpressed genes, wherein the genes are from one or more of the Carbohydrate/Lipid Metabolism metagene, the Cell Signalling metagene, the Cellular Development metagene, the Cellular Growth metagene, the Chromosome Segregation metagene, the DNA Replication/Recombination metagene, the Immune System metagene, the Metabolic Disease metagene, the Nucleic Acid Metabolism metagene, the Post-Translational Modification metagene, the Protein Synthesis/Modification metagene and/or the Multiple Networks metagene, to derive a fifth integrated score; or
[0237] (v) the comparison of the expression level of the overexpressed genes and an expression level of the underexpressed genes, wherein the genes are from one or more of the Metabolism metagene, the Signalling metagene, the Development and Growth metagene, the Chromosome Segregation/Replication metagene, the Immune Response metagene and/or the Protein Synthesis/Modification metagene, to derive a sixth integrated score.

[0238] In particular embodiments, the second, third, fourth, fifth and/or sixth integrated scores are derived, at least in part, by addition, subtraction, multiplication, division and/or exponentiation. By way of example, the comparison of the expression level of the one or more overexpressed proteins and the expression level of the one or more underexpressed proteins may be added to, subtracted from, multiplied by, divided by and/or raised to the power of (i) the comparison of the expression level of the plurality of overexpressed genes associated with chromosomal instability and the expression level of the plurality of underexpressed genes associated with estrogen receptor signalling; or (ii) the first integrated score. Alternatively, the comparison of the expression level of the plurality of overexpressed genes associated with chromosomal instability and the expression level of the plurality of underexpressed genes associated with estrogen receptor signalling or the first integrated score may be added to, subtracted from, multiplied by, divided by and/or raised to the power of the comparison of the expression level of the one or more overexpressed proteins and the expression level of the one or more underexpressed proteins.

[0239] In a further aspect, the invention provides a method of determining the aggressiveness of a cancer in a mammal, said method including the step of comparing an expression level of one or more overexpressed proteins selected from the group consisting of DVL3, PAI-1, VEGFR2, INPP4B, EIF4EBP1, EGFR, Ku80, HER3, SMAD1, GATA3, ITGA2, AKT1, NFKB1, HER2, ASNS and COL6A1, and an expression level of one or more underexpressed proteins selected from the group consisting of VEGFR2, HER3, ASNS, MAPK9, ESR1, YWHAE, RAD50, PGR, COL6A1, PEA15 and RPS6, in one or more cancer cells, tissues or organs of the mammal, wherein: a higher relative expression level of the one or more overexpressed proteins compared to the one or more underexpressed proteins indicates or correlates with higher aggressiveness of the cancer; and/or a lower relative expression level of the one or more overexpressed proteins compared to the one or more underexpressed proteins indicates or correlates with lower aggressiveness of the cancer compared to a mammal having a higher expression level.

[0240] In a related aspect, the invention provides a method of determining a cancer prognosis for a mammal, said method including the step of comparing an expression level of one or more overexpressed proteins selected from the group consisting of DVL3, PAI-1, VEGFR2, INPP4B, EIF4EBP1, EGFR, Ku80, HER3, SMAD1, GATA3, ITGA2, AKT1, NFKB1, HER2, ASNS and COL6A1, and an expression level of one or more underexpressed proteins selected from the group consisting of VEGFR2, HER3, ASNS, MAPK9, ESR1, YWHAE, RAD50, PGR, COL6A1, PEA15 and RPS6, in one or more cancer cells, tissues or organs of the mammal, wherein: a higher relative expression level of the one or more overexpressed proteins compared to the one or more underexpressed proteins indicates or correlates with a less favourable cancer prognosis; and/or a lower relative expression level of the one or more overexpressed proteins compared to the one or more underexpressed proteins indicates or correlates with a more favourable cancer prognosis compared to a mammal having a higher expression level.

[0241] In particular embodiments of the two aforementioned aspects, one or more of the overexpressed proteins and/or one or more of the underexpressed proteins are or comprise a phosphoprotein hereinbefore described.

[0242] An average or sum of the expression levels may be calculated for the one or more overexpressed proteins and the one or more underexpressed proteins, to thereby produce or calculate a ratio as hereinbefore described.

[0243] This information with respect to the aggressiveness and/or prognosis of a patient's cancer may prove useful to a physician and/or clinician in determining the most effective course of treatment. A determination of the likelihood for a cancer relapse or of the likelihood of metastasis can assist the physician and/or clinician in determining whether a more conservative or a more radical approach to therapy should be taken. As such, a prognosis may provide for the selection and classification of patients who are predicted to benefit from a given therapeutic regimen.

[0244] Accordingly, another aspect of the invention provides a method of predicting the responsiveness of a cancer to an anti-cancer treatment in a mammal, said method including the step of comparing an expression level of a plurality of overexpressed genes and an expression level of a plurality of underexpressed genes in one or more cancer cells, tissues or organs of the mammal, wherein the overexpressed genes and the underexpressed genes are from one or more metagenes selected from the group consisting of a Carbohydrate/Lipid Metabolism metagene, a Cell Signalling metagene, a Cellular Development metagene, a Cellular Growth metagene, a Chromosome Segregation metagene, a DNA Replication/Recombination metagene, an Immune System metagene, a Metabolic Disease metagene, a Nucleic Acid Metabolism metagene, a Post-Translational Modification metagene, a Protein Synthesis/Modification metagene and a Multiple Networks metagene, wherein an altered or modulated relative expression level of the overexpressed genes compared to the underexpressed genes indicates or correlates with relatively increased or decreased responsiveness of the cancer to the anti-cancer treatment.

[0245] As would be understood by the skilled person, the relative expression level of a gene or protein may be deemed to be “altered” or “modulated” when the expression level is higher/increased or lower/decreased when compared to a control or reference sample or expression level, such as a threshold level. In one embodiment, a relative expression level may be classified as high if it is greater than a mean and/or median relative expression level of a reference population and a relative expression level may be classified as low if it is less than the mean and/or median relative expression level of the reference population. In this regard, a reference population may be a group of subjects who have the same cancer type, subgroup, stage and/or grade as said mammal for which the relative expression level is determined.

[0246] Suitably, for the present aspect the Carbohydrate/Lipid Metabolism metagene, the Cell Signalling metagene, the Cellular Development metagene, the Cellular Growth metagene, the Chromosome Segregation metagene, the DNA Replication/Recombination metagene, the Immune System metagene, the Metabolic Disease metagene, the Nucleic Acid Metabolism metagene, the Post-Translational Modification metagene, the Protein Synthesis/Modification metagene and/or the Multiple Networks metagene comprise one or more genes listed in Table 21.

[0247] In a related aspect, the invention provides a method of predicting the responsiveness of a cancer to an anti-cancer treatment in a mammal, said method including the step of comparing an expression level of a plurality of overexpressed genes and an expression level of a plurality of underexpressed genes in one or more cancer cells, tissues or organs of the mammal, wherein the overexpressed genes and the underexpressed genes are from one or more metagenes selected from the group consisting of a Metabolism metagene, a Signalling metagene, a Development and Growth metagene, a Chromosome Segregation/Replication metagene, an Immune Response metagene and a Protein Synthesis/Modification metagene, wherein an altered or modulated relative expression level of the overexpressed genes compared to the underexpressed genes indicates or correlates with relatively increased or decreased responsiveness of the cancer to the anti-cancer treatment.

[0248] In one embodiment of the two aforementioned aspects, the plurality of overexpressed genes and/or the plurality of underexpressed genes are selected from one of the metagenes. In an alternative embodiment, the plurality of overexpressed genes and/or the plurality of underexpressed genes are selected from a plurality of the metagenes.

[0249] Suitably, the Metabolism metagene, the Signalling metagene, the Development and Growth metagene, the Chromosome Segregation/Replication metagene, the Immune Response metagene and/or the Protein Synthesis/Modification metagene comprise one or more genes listed in Table 22.

[0250] In particular embodiments, the plurality of overexpressed genes and the plurality of underexpressed genes are from one or more of a Carbohydrate/Lipid Metabolism metagene, a Cell Signalling metagene, a Cellular Development metagene, a Cellular Growth metagene, a Chromosome Segregation metagene, a DNA Replication/Recombination metagene, an Immune System metagene, a Metabolic Disease metagene, a Nucleic Acid Metabolism metagene, a Post-Translational Modification metagene, a Protein Synthesis/Modification metagene and a Multiple Networks metagene.

[0251] In a related aspect, the invention provides a method of predicting the responsiveness of a cancer to an anti-cancer treatment in a mammal, said method including the step of determining an expression level of one or more genes associated to with chromosomal instability (CIN) in one or more cancer cells of the mammal, wherein a higher expression level indicates or correlates with relatively increased responsiveness of the cancer to the anti-cancer treatment.

[0252] As will be described in more detail, overexpression of some CIN genes may be predictive of the responsiveness of a cancer to an anti-cancer treatment, particularly although not exclusively when overexpressed by non-mitotic cancer cells. In this context, by “non-mitotic” means that the cancer cell is not in the mitotic or “M phase” of the cell cycle. Preferably, the non-mitotic cancer cells are in interphase. Broadly, any overexpressed CIN gene set forth Table 4 may be predictive of the responsiveness of a cancer to an anti-cancer treatment. In particular embodiments, the CIN gene is selected from the group consisting of: TTK, CEP55, FOXM1 and SKIP2. In a particularly preferred embodiment, the CIN gene is selected from the group consisting of: TTK, CEP55, FOXM1 and SKIP2 and the cancer is breast cancer. In this regard, the inventors have shown that “bulk” measurements of extracted CIN gene mRNA or encoded protein do not provide a useful indication of whether overexpression of the CIN gene may be predictive of the responsiveness of a cancer to an anti-cancer treatment. More particularly, detection of CIN gene expression by individual cancer cells, particularly non-mitotic or interphase cancer cells, provides a more powerful indication of the responsiveness of a cancer to an anti-cancer treatment.

[0253] As previously described, detection and/or measurement of expression of the CIN gene may be performed by measuring RNA (e.g mRNA or an amplified cDNA copy thereof) or by measuring a protein product of a CIN gene. In a particularly preferred embodiment, a protein product of a CIN gene is detected or measured by immunohistochemistry. Typically, although not exclusively, a preferred immunohistochemistry method includes binding an antibody to the protein product of a CIN gene expressed by a cell or tissue and subsequent detection of the bound antibody. By way of example only, the antibody may be unlabelled, directly labelled with an enzyme such as horseradish peroxidase, alkaline phosphatase or glucose oxidase or directly labelled with biotin or digoxigenin. In embodiments where the antibody is unlabelled, a secondary antibody (labelled such as described above) may be used to detect the bound antibody. Biotinylated antibodies may be detected using avidin complexed with an enzyme such as horseradish peroxidase, alkaline phosphatase or glucose oxidase. Suitable enzyme substrates include diaminobanzidine (DAB), permanent red, 3-ethylbenzthiazoline sulfonic acid (ABTS), 5-bromo-4-chloro-3-indolyl phosphate (BCIP), nitro blue tetrazolium (NBT), 3,3′,5,5′-tetramethyl benzidine (TNB) and 4-chloro-1-naphthol (4-CN), although without limitation thereto.

[0254] In a further aspect, the invention provides a method of predicting the responsiveness of a cancer to an anti-cancer treatment in a mammal, said method including the step of comparing an expression level of a plurality of overexpressed genes associated with chromosomal instability and an expression level of a plurality of underexpressed genes associated with estrogen receptor signalling in one or more cancer cells, tissues or organs of the mammal, wherein an altered or modulated relative expression level of the overexpressed genes associated with chromosomal instability compared to the underexpressed genes associated with estrogen receptor signalling indicates or correlates with relatively increased or decreased responsiveness of the cancer to the anti-cancer treatment.

[0255] In certain embodiments, the genes associated with chromosomal instability are of a CIN metagene. Non-limiting examples include genes selected from the group consisting of: ATP6V1C1, RAP2A, CALM1, COG8, HELLS, KDM5A, PGK1, PLCH1, CEP55, RFC4, TAF2, SF3B3, GP1, PIR, MCM10, MELK, FOXM1, KIF2C, NUP155, TPX2, 11K, CENPA, CENPN, EXO1, MAPRE1, ACOT7, NAE1, SHMT2, TCP1, TXNRD1, ADM, CHAF1A and SYNCRIP. In one preferred embodiment, the chromosomal instability genes are selected from the group consisting of MELK, MCM10, CENPA, EXO1, TTK and KIF2C.

[0256] In certain embodiments, the genes associated with estrogen receptor signalling are of an ER metagene. Non-limiting examples include genes selected from the group consisting of: BTG2, PIK3IP1, SEC14L2, FLNB, ACSF2, APOM, BIN3, GLTSCR2, ZMYND10, ABAT, BCAT2, SCUBE2, RUNX1, LRRC48, MYBPC1, BCL2, CHPT1, ITM2A, LRIG1, MAPT, PRKCB, RERE, ABHD14A, FLT3, TNN, STC2, BATF, CD1E, CFB, EVL, FBXW4, ABCB1, ACAA1, CHAD, PDCD4, RPL10, RPS28, RPS4X, RPS6, SORBS1, RPL22 and RPS4XP3. In one preferred embodiment, the estrogen receptor signalling genes are selected from the group consisting of MAPT and MYB.

[0257] Suitably, the method of this aspect further includes the step of comparing an expression level of one or more other overexpressed genes selected from the group consisting of CAMSAP1, CETN3, GRHPR, ZNF593, CA9, CFDP1, VPS28, ADORA2B, GSK3B, LAMA4, MAP2K5, HCFC1R1, KCNG1, BCAP31, ULBP2, CARHSP1, PML, CD36, CD55, GEMIN4, TXN, ABHD5, EIF3K, EIF4B, EXOSC7, GNB2L1, LAMA3, NDUFC1 and STAU1, and an expression level of one or more other underexpressed genes selected from the group consisting of BRD8, BTN2A2. KIR2DL4. ME1, PSEN2, CALR, CAMK4, ITM2C, NOP2, NSUN5, SF3B1, ZNRD1-AS1, ARNT2, ERC2, SLC11A1, BRD4, APOBEC3A, CD1A, CD1B, CD1C, CXCR4, HLA-B, IGH, KIR2DL3, SMPDL3B, MYB, RLN1, MTMR7, SORBS1 and SRPK3 in one or more cancer cells, tissues or organs of the mammal, wherein an altered or modulated relative expression level of the one or more other overexpressed genes compared to the one or more other underexpressed genes indicates or correlates with relatively increased or decreased responsiveness of the cancer to the anti-cancer treatment.

[0258] In one embodiment, the one or more other overexpressed genes are selected from the group consisting of ABHD5, ADORA2B, BCAP31, CA9, CAMSAP1, CARHSP1, CD55, CETN3, EIF3K, EXOSC7, GNB2L1, GRHPR, GSK3B, HCFC1R1, KCNG1, MAP2K5, NDUFC1, PML, STAU1, TXN and ZNF593.

[0259] In one embodiment, the one or more other underexpressed genes are selected from the group consisting of BTN2A2, ERC2, IGH, ME1, MTMR7, SMPDL3B and ZNRD1-AS1.

[0260] In certain embodiments, the comparison of the expression level of the one or more other overexpressed genes and the expression level of the one or more other underexpressed genes is integrated with the comparison of the expression level of the plurality of overexpressed genes associated with chromosomal instability and the expression level of the plurality of underexpressed genes associated with estrogen receptor signalling to derive a first integrated score as described herein, which is indicative of, or correlates with, responsiveness of the cancer to the anti-cancer treatment.

[0261] In another related aspect, the invention provides a method of predicting the responsiveness of a cancer to an anti-cancer treatment in a mammal, said method including the step of comparing an expression level of one or more overexpressed genes selected from the group consisting of CAMSAP1, CETN3, GRHPR, ZNF593, CA9, CFDP1, VPS28, ADORA2B, GSK3B, LAMA4, MAP2K5, HCFC1R1, KCNG1, BCAP31, ULBP2, CARHSP1, PML, CD36, CD55, GEMIN4, TXN, ABHD5, EIF3K, EIF4B, EXOSC7, GNB2L1, LAMA3, NDUFC1 and STAU1, and an expression level of one or more underexpressed genes selected from the group consisting of BRD8, BTN2A2. KIR2DL4. ME1, PSEN2, CALR, CAMK4, ITM2C, NOP2, NSUN5, SF3B1, ZNRD1-AS1, ARNT2, ERC2, SLC11A1, BRD4, APOBEC3A, CD1A, CD1B, CD1C, CXCR4, HLA-B, IGH, KIR2DL3, SMPDL3B, MYB, RLN1, MTMR7, SORBS1 and SRPK3, in one or more cancer cells, tissues or organs of the mammal, wherein an altered or modulated relative expression level of the one or more overexpressed genes compared to the one or more underexpressed genes indicates or correlates with relatively increased or decreased responsiveness of the cancer to the anti-cancer treatment.

[0262] In one embodiment, the one or more overexpressed genes are selected from the group consisting of ABHD5, ADORA2B, BCAP31, CA9, CAMSAP1, CARHSP1, CD55, CETN3, EIF3K, EXOSC7, GNB2L1, GRHPR, GSK3B, HCFC1R1, KCNG1, MAP2K5, NDUFC1, PML, STAU1, TXN and ZNF593.

[0263] In one embodiment, the one or more underexpressed genes are selected from the group consisting of BTN2A2, ERC2, IGH, ME1, MTMR7, SMPDL3B and ZNRD1-AS1.

[0264] In particular embodiments, the method of the five aforementioned aspects further includes the step of comparing an expression level of one or more overexpressed proteins selected from the group consisting of DVL3, PM-1, VEGFR2, INPP4B, EIF4EBP1, EGFR, Ku80, HER3, SMAD1, GATA3, ITGA2, AKT1, NFKB1, HER2, ASNS and COL6A1, and an expression level of one or more underexpressed proteins selected from the group consisting of VEGFR2, HER3, ASNS, MAPK9, ESR1, YWHAE, RAD50, PGR, COL6A1, PEA15 and RPS6, in one or more cancer cells, tissues or organs of the mammal, wherein: a higher relative expression level of the one or more overexpressed proteins compared to the one or more underexpressed proteins indicates or correlates with higher aggressiveness of the cancer and/or a less favourable cancer prognosis; and/or a lower relative expression level of the one or more overexpressed proteins compared to the one or more underexpressed proteins indicates or correlates with lower aggressiveness of the cancer and/or a more favourable cancer prognosis compared to a mammal having a higher expression level.

[0265] In particular embodiments, one or more of the overexpressed proteins and/or one or more of the underexpressed proteins are or comprise a phosphoprotein hereinbefore described.

[0266] An average or sum of the expression levels may be calculated for the overexpressed genes, the underexpressed genes, the overexpressed proteins and/or the underexpressed proteins, to thereby produce or calculate a ratio, as hereinbefore described.

[0267] Detection and/or measurement of expression of the overexpressed proteins and the underexpressed proteins may be performed by any of those methods or combinations thereof hereinbefore described, albeit without limitation thereto.

[0268] Suitably, the comparison of the expression level of the one or more overexpressed proteins and the expression level of the one or more underexpressed proteins is to thereby derive an integrated score. In one particular embodiment, the comparison of the expression level of the one or more overexpressed proteins and the expression level of the one or more underexpressed proteins is integrated with:
[0269] (i) the comparison of the expression level of the overexpressed genes associated with chromosomal instability and the expression level of the underexpressed genes associated with estrogen receptor signalling to derive a second integrated score; or
[0270] (ii) the first integrated score to derive a third integrated score; or
[0271] (iii) the comparison of the expression level of the overexpressed genes selected from the group consisting of CAMSAP1, CETN3, GRHPR, ZNF593, CA9, CFDP1, VPS28, ADORA2B, GSK3B, LAMA4, MAP2K5, HCFC1R1, KCNG1, BCAP31, ULBP2, CARHSP1, PML, CD36, CD55, GEMIN4, TXN, ABHD5, EIF3K, EIF4B, EXOSC7, GNB2L1, LAMA3, NDUFC1 and STAU1 and the expression level of the underexpressed genes selected from the group consisting of BRD8, BTN2A2. KIR2DL4. ME1, PSEN2, CALR, CAMK4, ITM2C, NOP2, NSUN5, SF3B1, ZNRD1-AS1, ARNT2, ERC2, SLC11A1, BRD4, APOBEC3A, CD1A, CD1B, CD1C, CXCR4, HLA-B, IGH, KIR2DL3, SMPDL3B, MYB, RLN1, MTMR7, SORBS1 and SRPK3 to derive a fourth integrated score; or
[0272] (iv) the comparison of the expression level of the overexpressed genes and an expression level of the underexpressed genes, wherein the genes are from one or more of the Carbohydrate/Lipid Metabolism metagene, the Cell Signalling metagene, the Cellular Development metagene, the Cellular Growth metagene, the Chromosome Segregation metagene, the DNA Replication/Recombination metagene, the Immune System metagene, the Metabolic Disease metagene, the Nucleic Acid Metabolism metagene, the Post-Translational Modification metagene, the Protein Synthesis/Modification metagene and/or the Multiple Networks metagene, to derive a fifth integrated score; or
[0273] (v) the comparison of the expression level of the overexpressed genes and an expression level of the underexpressed genes, wherein the genes are from one or more of the Metabolism metagene, the Signalling metagene, the Development and Growth metagene, the Chromosome Segregation/Replication metagene, the Immune Response metagene and/or the Protein Synthesis/Modification metagene, to derive a sixth integrated score,
   wherein the second, third, fourth, fifth and/or sixth integrated score is indicative of, or correlates with, responsiveness of the cancer to the anti-cancer treatment.

[0274] In particular embodiments, the second, third, fourth, fifth and/or sixth integrated scores are derived, at least in part, by addition, subtraction, multiplication, division and/or exponentiation, as hereinbefore described.

[0275] In a further related aspect, the invention provides a method of predicting the responsiveness of a cancer to an anti-cancer treatment in a mammal, said method including the step of comparing an expression level of one or more overexpressed proteins selected from the group consisting of DVL3, PAI-1, VEGFR2, INPP4B, EIF4EBP1, EGFR, Ku80, HER3, SMAD1, GATA3, ITGA2, AKT1, NFKB1, HER2, ASNS and COL6A1, and an expression level of one or more underexpressed proteins selected from the group consisting of VEGFR2, HER3, ASNS, MAPK9, ESR1, YWHAE, RAD50, PGR, COL6A1, PEA15 and RPS6, in one or more cancer cells, tissues or organs of the mammal, wherein an altered or modulated relative expression level of the one or more overexpressed proteins compared to the one or more underexpressed proteins indicates or correlates with relatively increased or decreased responsiveness of the cancer to the anti-cancer treatment.

[0276] In particular embodiments, one or more of the overexpressed proteins and/or one or more of the underexpressed proteins are or comprise a phosphoprotein hereinbefore described.

[0277] It will be appreciated from the foregoing that the invention provides methods that determine the aggressiveness of a cancer, facilitate providing a cancer prognosis for a patient and/or predict the responsiveness of a cancer to an anti-cancer treatment. Particular, broad embodiments of the invention include the step of treating the patient following determining the aggressiveness of the cancer, providing a cancer prognosis and/or predicting the responsiveness of the cancer to anti-cancer treatment. Accordingly, these embodiments relate to using information obtained about the aggressiveness of the cancer, the cancer prognosis and/or the predicted responsiveness of the cancer to anti-cancer treatment to thereby construct and implement an anti-cancer treatment regime for the patient. In a preferred embodiment, this is personalized to a particular patient so that the treatment regime is optimized for that particular patient.

[0278] Cancer treatments may include drug therapy, chemotherapy, antibody, nucleic acid and other biomolecular therapies, radiation therapy, surgery, nutritional therapy, relaxation or meditational therapy and other natural or holistic therapies, although without limitation thereto. In particular embodiments, the cancer therapy may target aneuploidy or aneuploid tumours and/or chromosomal instability.

[0279] Generally, drugs, biomolecules (e.g antibodies, inhibitory nucleic acids such as siRNA) or chemotherapeutic agents are referred to herein as “anti-cancer therapeutic agents”. In some embodiments relating to breast cancer, the anti-cancer treatment may include HER2-directed therapy such as trastuzumab and endocrine therapies such as tamoxifen and aromatase inhibitors. In other or alternative embodiments, the therapy may include administration of inhibitors of CIN genes or CIN gene products, such as one or more of those listed in Table 4. It will be appreciated that inhibition of the CIN gene product TTK using the specific inhibitor AZ3146 was effective against TNBC cell lines. Furthermore, siRNA-mediated knockdown of the CIN genes 11K, TPX2, NDC80 and PBK was effective against TNBC cell lines.

[0280] In certain embodiments, the cancer treatment may be directed at genes or gene products other than those listed in Tables 4, 10, 21 and/or 22. By way of example, the cancer treatment may target genes or gene products such as PLK1^{71,72} or others⁷³⁻⁷⁶ to thereby target aneuploid tumours or tumour cells.

[0281] Suitably, when considering (i) the relative expression of one or more of the overexpressed genes of the 29 gene signature (i.e., CAMSAP1, CETN3, GRHPR, ZNF593, CA9, CFDP1, VPS28, ADORA2B, GSK3B, LAMA4, MAP2K5, HCFC1R1, KCNG1, BCAP31, ULBP2, CARHSP1, PML, CD36, CD55, GEMIN4, TXN, ABHD5, EIF3K, EIF4B, EXOSC7, GNB2L1, LAMA3, NDUFC1 and STAU1) when compared to one or more of the underexpressed genes of the 30 gene signature (i.e., BRD8, BTN2A2. KIR2DL4. ME1, PSEN2, CALR, CAMK4, ITM2C, NOP2, NSUN5, SF3B1, ZNRD1-AS1, ARNT2, ERC2, SLC11A1, BRD4, APOBEC3A, CD1A, CD1B, CD1C, CXCR4, HLA-B, IGH, KIR2DL3, SMPDL3B, MYB, RLN1, MTMR7, SORBS1 and SRPK3); (ii) the relative expression of one or more of the overexpressed proteins (i.e., DVL3, PAI-1, VEGFR2, INPP4B, EIF4EBP1, EGFR, Ku80, HER3, SMAD1, GATA3, ITGA2, AKT1, NFKB1, HER2, ASNS and COL6A1) when compared to one or more of the underexpressed proteins (i.e., VEGFR2, HER3, ASNS, MAPK9, ESR1, YWHAE, RAD50, PGR, COL6A1, PEA15 and RPS6); and/or (iii) the first, second, third and/or fourth integrated score, the anticancer therapeutic agent is selected from the group consisting of a chemotherapy, an endocrine therapy, immunotherapy and a molecularly targeted therapy. In certain embodiments, the anticancer treatment comprises an ALK inhibitor (e.g., TAE684), an Aurora kinase inhibitor (e.g., Alisertib, AMG-900, BI-847325, GSK-1070916A, ilorasertib, MK-8745, danusertib), a BCR-ABL inhibitor (e.g., Nilotinib, Dasatinib, Ponatinib), a HSP90 inhibitor (e.g., Tanespimycin (17-AAG), PF0429113, AUY922, Luminespib, ganetespib, Debio-0932), an EGFR inhibitor (e.g., Afatinib, Erlotinib, Lapatinib, cetuximab), a PARP inhibitor (e.g., ABT-888, AZD-2281), retinoic acid (e.g., all-trans retinoic acid or ATRA), a Bcl2 inhibitor (e.g., ABT-263), a gluconeogenesis inhibitor (e.g., metformin), a p38 MAPK inhibitor (e.g., BIRB0796, LY2228820), a MEK1/2 inhibitor (e.g., trametinib, cobimetinib, binimetinib, selumetinib, pimasertib, refametinib, TAK-733), a mTOR inhibitor (e.g., BEZ235, JW-7-25-1), a PI3K inhibitor (e.g., Idelalisib, buparlisib/apelisib, copanlisib, GSK-2636771, pictilisib, AMG-319, AZD-8186), an IGF1R inhibitor (e.g., BMS-754807, dalotuzumab, ganitumab, linsitinib), a PLCγ inhibitor (e.g., U73122), a JNK inhibitor (e.g., SP600125), a PAK1 inhibitor (e.g., IPA3), a SYK inhibitor (e.g., BAY613606), a HDAC inhibitor (e.g., Vorinostat), an FGFR inhibitor (e.g., Dovitinib), a XIAP inhibitor (e.g., Embelin), a PLK1 inhibitor (e.g., Volasertib, P-937), an ERK5 inhibitor (e.g., XMD8-92), a MPS1/TTK inhibitor (e.g., BAY-1161909) and any combination thereof.

[0282] By way of example, patients with a high relative expression level of one or more overexpressed genes, such as those of the 21 gene signature, when compared to one or more underexpressed genes, such as those of the 7 gene signature, a high relative expression level of one or more overexpressed proteins when compared to one or more underexpressed proteins and/or a high integrated score described herein are more likely to respond favourably, such as a pathological complete response, when treated with chemotherapy. In this regard, non-limiting examples of chemotherapy include a pyrimidine analogue (e.g., 5-fluorouracil, capecitabine), a taxane (e.g., paclitaxel), an anthracycline (e.g., doxorubicin, epirubicin), an anti-folate drug (e.g., the dihydrofolate reductase inhibitor methotrexate), an alkylating agent (e.g., cyclophosphamide) or any combination thereof. It would be appreciated that the chemotherapy may be administered as adjuvant, neoadjuvant and/or as standard therapy, alone or in combination with other anticancer therapeutics.

[0283] Additionally, in certain embodiments, patients with a high relative expression level of one or more overexpressed genes, such as those of the 29 gene signature, when compared to one or more underexpressed genes, such as those of the 30 gene signature, a high relative expression level of one or more overexpressed proteins when compared to one or more underexpressed proteins and/or a high integrated score described herein may be more likely to respond favourably to (i.e., be more sensitive to) inhibition of HSP90, EGFR, IGF1R, mTOR, PI3K, p38 MAPK, PLCγ, JNK, PAK1, ERK5, XIAP, PLK1 and/or MEK1/2 and may be less likely to respond favourably to (i.e., be less sensitive to) anticancer treatment with an ALK inhibitor, a BCR-ABL inhibitor, a PARP inhibitor, retinoic acid, a Bcl2 inhibitor, a gluconeogenesis inhibitor, a p38 MAPK inhibitor, an FGFR inhibitor, a SYK inhibitor, a HDAC inhibitor and/or an IGF1R inhibitor.

[0284] It will also be understood that the gene and protein signatures described herein may be used to identify those poorer prognosis patients, such as those with larger and/or higher grade tumours, who may benefit from one or more additional anticancer therapeutic agents to the typical or standard anti-cancer treatment regime for that particular patient group. By way of example, ER⁺ breast cancer patients with or without lymph node involvement with a high integrated score, and hence a relatively poor prognosis, are more likely to respond favourably to or benefit from chemotherapy and/or endocrine therapy. This may include an improved survival and/or reduced likelihood of tumour recurrence and/or metastasis for these patients.

[0285] In certain embodiments, for patients with a high relative expression level of the overexpressed genes of the 21 gene signature when compared to the underexpressed genes of the 7 gene signature and/or a high integrated score, the cancer treatment may be directed at those genes or gene products listed in Tables 13, 15, 16 and 17.

[0286] Additionally, for patients with a high relative expression level of the overexpressed proteins when compared to the underexpressed proteins and/or a high integrated score the cancer treatment may be directed at one or more of those proteins listed in Table 19.

[0287] It would be appreciated that those methods described herein for predicting the responsiveness of a cancer to an anti-cancer treatment, such as an immunotherapeutic agent, may further include the step of administering to the mammal a therapeutically effective amount of the anticancer treatment. In a preferred embodiment, the anticancer treatment is administered when the altered or modulated relative expression level indicates or correlates with relatively increased responsiveness of the cancer to the anti-cancer treatment.

[0288] Methods of treating cancer may be prophylactic, preventative or therapeutic and suitable for treatment of cancer in mammals, particularly humans. As used herein, “treating”, “treat” or “treatment” refers to a therapeutic intervention, course of action or protocol that at least ameliorates a symptom of cancer after the cancer and/or its symptoms have at least started to develop. As used herein, “preventing”, “prevent” or “prevention” refers to therapeutic intervention, course of action or protocol initiated prior to the onset of cancer and/or a symptom of cancer so as to prevent, inhibit or delay or development or progression of the cancer or the symptom.

[0289] The term “therapeutically effective amount” describes a quantity of a specified agent sufficient to achieve a desired effect in a subject being treated with that agent. For example, this can be the amount of a composition comprising one or more agents that binds one or more of the overexpressed and/or underexpressed genes or gene products thereof described herein, necessary to reduce, alleviate and/or prevent a cancer or cancer associated disease, disorder or condition. In some embodiments, a “therapeutically effective amount” is sufficient to reduce or eliminate a symptom of a cancer. In other embodiments, a “therapeutically effective amount” is an amount sufficient to achieve a desired biological effect, for example an amount that is effective to decrease or prevent cancer growth and/or metastasis.

[0290] Ideally, a therapeutically effective amount of an agent is an amount sufficient to induce the desired result without causing a substantial cytotoxic effect in the subject. The effective amount of an agent useful for reducing, alleviating and/or preventing a cancer will be dependent on the subject being treated, the type and severity of any associated disease, disorder and/or condition (e.g., the number and location of any associated metastases), and the manner of administration of the therapeutic composition.

[0291] Suitably, the anti-cancer therapeutic agent is administered to a mammal as a pharmaceutical composition comprising a pharmaceutically-acceptable carrier, diluent or excipient.

[0292] By “pharmaceutically-acceptable carrier, diluent or excipient” is meant a solid or liquid filler, diluent or encapsulating substance that may be safely used in systemic administration. Depending upon the particular route of administration, a variety of carriers, well known in the art may be used. These carriers may be selected from a group including sugars, starches, cellulose and its derivatives, malt, gelatine, talc, calcium sulfate, liposomes and other lipid-based carriers, vegetable oils, synthetic oils, polyols, alginic acid, phosphate buffered solutions, emulsifiers, isotonic saline and salts such as mineral acid salts including hydrochlorides, bromides and sulfates, organic acids such as acetates, propionates and malonates and pyrogen-free water.

[0293] A useful reference describing pharmaceutically acceptable carriers, diluents and excipients is Remington's Pharmaceutical Sciences (Mack Publishing Co. N.J. USA, 1991), which is incorporated herein by reference.

[0294] Any safe route of administration may be employed for providing a patient with the composition of the invention. For example, oral, rectal, parenteral, sublingual, buccal, intravenous, intra-articular, intra-muscular, intra-dermal, subcutaneous, inhalational, intraocular, intraperitoneal, intracerebroventricular, transdermal and the like may be employed. Intra-muscular and subcutaneous injection is appropriate, for example, for administration of immunotherapeutic compositions, proteinaceous vaccines and nucleic acid vaccines.

[0295] Dosage forms include tablets, dispersions, suspensions, injections, solutions, syrups, troches, capsules, suppositories, aerosols, transdermal patches and the like. These dosage forms may also include injecting or implanting controlled releasing devices designed specifically for this purpose or other forms of implants modified to act additionally in this fashion. Controlled release of the therapeutic agent may be effected by coating the same, for example, with hydrophobic polymers including acrylic resins, waxes, higher aliphatic alcohols, polylactic and polyglycolic acids and certain cellulose derivatives such as hydroxypropylmethyl cellulose. In addition, the controlled release may be effected by using other polymer matrices, liposomes and/or microspheres.

[0296] Compositions of the present invention suitable for oral or parenteral administration may be presented as discrete units such as capsules, sachets or tablets each containing a pre-determined amount of one or more therapeutic agents of the invention, as a powder or granules or as a solution or a suspension in an aqueous liquid, a non-aqueous liquid, an oil-in-water emulsion or a water-in-oil liquid emulsion. Such compositions may be prepared by any of the methods of pharmacy but all methods include the step of bringing into association one or more agents as described above with the carrier which constitutes one or more necessary ingredients. In general, the compositions are prepared by uniformly and intimately admixing the agents of the invention with liquid carriers or finely divided solid carriers or both, and then, if necessary, shaping the product into the desired presentation.

[0297] The above compositions may be administered in a manner compatible with the dosage formulation, and in such amount as is pharmaceutically-effective. The dose administered to a patient, in the context of the present invention, should be sufficient to effect a beneficial response in a patient over an appropriate period of time. The quantity of agent(s) to be administered may depend on the subject to be treated inclusive of the age, sex, weight and general health condition thereof, factors that will depend on the judgement of the practitioner.

[0298] In particular embodiments of the hereinbefore described methods, the cancer is breast cancer and the one or more overexpressed proteins are selected from the group consisting of DVL3, VEGFR2, INPP4B, EIF4EBP1, EGFR, HER3, SMAD1, NFKB1 and HER2 and the one or more underexpressed proteins are selected from the group consisting of ASNS, MAPK9, YWHAE, RAD50, PGR, COL6A1, PEA15 and RPS6.

[0299] In particular embodiments of the hereinbefore described methods, the cancer is lung cancer, such as lung adenocarcinoma, wherein:

[0300] (i) the one or more overexpressed genes are selected from the group consisting of GNB2L1, TXN, KCNG1, BCAP31, GSK3B, FOXM1, ZNF593, EXO1, KIF2C, TTK, MELK, CENPA, TPX2, CA9, GRHPR, HCFC1R1,CEP55, MCM10, CENPN and CARHSP1, and the one or more underexpressed genes are selected from the group consisting of BTN2A2, MTMR7, ZNRD1-AS1, MAPT and BTG2; and/or

[0301] (ii) the one or more overexpressed proteins are selected from the group consisting of DVL3, PAI-1, Ku80, GATA3, ITGA2 and AKT1, and the one or more underexpressed proteins are selected from the group consisting of ESR1.

[0302] In particular embodiments of the hereinbefore described methods, the cancer is kidney cancer, such as renal clear cell carcinoma, wherein:

[0303] (i) the one or more overexpressed genes are selected from the group consisting of EIF3K, ADORA2B, KCNG1, BCAP31, EXOSC7, FOXM1, CD55, ZNF593, KIF2C, TTK, MELK, CENPA, TPX2, CEP55, PML, CENPN and CARHSP1, and the one or more underexpressed genes are selected from the group consisting of BCL2 and MAPT; and/or

[0304] (ii) the one or more overexpressed proteins are selected from the group consisting of DVL3, PAI-1 and EIF4EBP1, and the one or more underexpressed proteins are selected from the group consisting of HER3, MAPK9, ESR1 and RAD50.

[0305] In particular embodiments of the hereinbefore described methods, the cancer is melanoma, such as skin cutaneous melanoma, and wherein:

[0306] (i) the one or more overexpressed genes are selected from the group consisting of EIF3K, ADORA2B, GSK3B, EXOSC7, FOXM1, EXO1, KIF2C, CENPA, TPX2, CAMSAP1, MCM10 and ABHD5 and the one or more underexpressed genes are selected from the group consisting of BCAP31, BTN2A2, SMPDL3B, MTMR7, ME1 and BTG2; and/or

[0307] (ii) the one or more overexpressed proteins are selected from the group consisting of PAI-1, EIF4EBP1, EGFR, HER3 and Ku80 and the one or more underexpressed proteins are selected from the group consisting of ASNS, MAPK9 and ESR1.

[0308] In particular embodiments of the hereinbefore described methods, the cancer is endometrial cancer, such as uterine corpus endometrioid carcinoma, and wherein:

[0309] (i) the one or more overexpressed genes are selected from the group consisting of GNB2L1, EIF3K, KCNG1, BCAP31, GSK3B, EXOSC7, FOXM1, ZNF593, EXO1, KIF2C, MAP2K5, TTK, MELK, GRHPR, and PML, and the one or more underexpressed genes is MYB; and/or

[0310] (ii) the one or more overexpressed proteins are selected from the group consisting of DVL3, INPP4B, EIF4EBP1 and ASNS and the one or more underexpressed proteins are selected from the group consisting of MAPK9, ESR1 and YWHAE.

[0311] In particular embodiments of the hereinbefore described methods, the cancer is ovarian adenocarcinoma and wherein:

[0312] (i) the one or more overexpressed genes are selected from the group consisting of GNB2L1, EIF3K, TXN, ADORA2B, KCNG1, GSK3B, STAU1, MAP2K5, and HCFC1R1, and the one or more underexpressed genes are selected from the group consisting of BTN2A2, and ZNRD1-AS1; and/or

[0313] (ii) the one or more overexpressed proteins are selected from the group consisting of PAI-1 and VEGFR2 and the one or more underexpressed proteins are selected from the group consisting of ASNS, MAPK9, ESR1, YWHAE and PGR.

[0314] In particular embodiments of the hereinbefore described methods, the cancer is head and neck cancer, such as head and neck squamous cell carcinoma, and wherein:

[0315] (i) the one or more overexpressed genes are selected from the group consisting of GNB2L1, TXN, ADORA2B, KCNG1, CD55, ZNF593, NDUFC1, and HCFC1R1, and the one or more underexpressed genes are selected from the group consisting of BTN2A2, and MTMR7; and/or

[0316] (ii) the one or more overexpressed proteins are selected from the group consisting of PAI-1, INPP4B, EGFR, HER3, SMAD1, GATA3, ITGA2 and COL6A1 and the one or more underexpressed proteins are selected from the group consisting of VEGFR2 and ASNS.

[0317] In particular embodiments of the hereinbefore described methods, the cancer is colorectal cancer, such as colorectal adenocarcinoma, and wherein:

[0318] (i) the one or more overexpressed genes are selected from the group consisting of EIF3K, TXN, CD55, NDUFC1, HCFC1R1, and PML, and the one or more underexpressed genes are selected from the group consisting of BTN2A2, SMPDL3B, and ME1; and/or

[0319] (ii) the one or more overexpressed proteins are selected from the group consisting of DVL3, PAI-1, INPP4B, EIF4EBP1, EGFR and HER3 and the one or more underexpressed proteins are selected from the group consisting of ASNS, MAPK9, YWHAE, RAD50 and PEA15.

[0320] In particular embodiments of the hereinbefore described methods, the cancer is glioma, such as lower grade glioma, and wherein:

[0321] (i) the one or more overexpressed genes are selected from the group consisting of TXN, BCAP31, STAU1, PML, CARHSP1, and BTN2A2; and/or

[0322] (ii) the one or more overexpressed proteins are selected from the group consisting of DVL3, PAI-1, VEGFR2, Ku80, SMAD1 and NFKB1 and the one or more underexpressed proteins are selected from the group consisting of ESR1, YWHAE and PGR.

[0323] In particular embodiments of the hereinbefore described methods, the cancer is bladder cancer, such as urothelial carcinoma, and wherein:

[0324] (i) the one or more overexpressed genes are selected from the group consisting of ADORA2B, KCNG1, STAU1, MAP2K5, and CAMSAP1, and the one or more underexpressed genes are selected from the group consisting of GNB2L1, EIF3K, TXN, BCAP31, EXOSC7, CD55, NDUFC1, GRHPR, CETN3, BTN2A2, SMPDL3B, and ERC2; and/or

[0325] (ii) the one or more overexpressed proteins are selected from the group consisting of DVL3, VEGFR2, Ku80, SMAD1 and AKT1 and the one or more underexpressed proteins is ASNS.

[0326] In particular embodiments of the hereinbefore described methods, the cancer is lung cancer, such as lung squamous cell carcinoma, and wherein:

[0327] (i) the one or more overexpressed genes are selected from the group consisting of GNB2L1, ZNF593, and SMPDL3B, and the one or more underexpressed genes are selected from the group consisting of GSK3B, MAP2K5, NDUFC1, CAMSAP1, ABHD5, and ME1; and/or

[0328] (ii) the one or more overexpressed proteins are selected from the group consisting of DVL3, PAI-1, VEGFR2, INPP4B, EGFR and GATA3 and the one or more underexpressed proteins is ASNS.

[0329] In particular embodiments of the hereinbefore described methods, the cancer is adrenocortical carcinoma, and wherein:

[0330] the one or more overexpressed genes are selected from the group consisting of GNB2L1, EIF3K, TXN, ADORA2B, KCNG1, BCAP31, FOXM1, ZNF593, EXO1, KIF2C, MAP2K5, TTK, MELK, CENPA, TPX2, GRHPR, CEP55, MCM10, and CENPN, and the one or more underexpressed genes are selected from the group consisting of MTMR7, BCL2, MAPT, MYB, and STC2.

[0331] In particular embodiments of the hereinbefore described methods, the cancer is kidney renal papillary cell carcinoma and wherein:

[0332] the one or more overexpressed genes are selected from the group consisting of GNB2L1, ADORA2B, KCNG1, GSK3B, FOXM1, CD55, EXO1, KIF2C, STAU1, TTK, MELK, CENPA, TPX2, CA9, CEP55, and MCM10, and the one or more underexpressed genes are selected from the group consisting of SMPDL3B, and BCL2.

[0333] In particular embodiments of the hereinbefore described methods, the cancer is pancreatic ductal adenocarcinoma and wherein:

[0334] the one or more overexpressed genes are selected from the group consisting of EIF3K, ADORA2B, GSK3B, EXOSC7, FOXM1, CD55, EXO1, STAU1, CAMSAP1, and CETN3 and the one or more underexpressed genes are selected from the group consisting of BTN2A2, SMPDL3B, MTMR7, ME1, BCL2, and ERC2.

[0335] In particular embodiments of the hereinbefore described methods, the cancer is liver hepatocellular carcinoma and wherein:

[0336] the one or more overexpressed genes are selected from the group consisting of GNB2L1, TXN, EXOSC7, and CA9, and the one or more underexpressed genes is MTMR7.

[0337] In particular embodiments of the hereinbefore described methods, the cancer is cervical squamous cell carcinoma and/or endocervical adenocarcinoma and wherein:

[0338] the one or more overexpressed genes are selected from the group consisting of STAU1, CA9, and ME1 and the one or more underexpressed genes are selected from the group consisting of EIF3K, TXN, BCAP31, EXOSC7, and ZNRD1-AS1.

[0339] Furthermore, in certain embodiments, patients with a high relative expression level of one or more overexpressed genes, such as those of the 29 gene signature, when compared to one or more underexpressed genes, such as those of the 30 gene signature, a high relative expression level of one or more overexpressed proteins when compared to one or more underexpressed proteins and/or a high integrated score as described herein may be more likely to respond favourably to immunotherapy.

[0340] Accordingly, one aspect provides a method of predicting the responsiveness of a cancer to an immunotherapeutic agent in a mammal, said method including the step of comparing an expression level of one or more overexpressed genes selected from the group consisting of ADORA2B, CD36, CETN3, KCNG1, LAMA3, MAP2K5, NAE1, PGK1, STAU1, CFDP1, SF3B3 and TXN, and an expression level of one or more underexpressed genes selected from the group consisting of APOBEC3A, BCL2, BTN2A2, CAMSAP1, CAMK4, CARHSP1, FBXW4, GSK3B, HCFC1R1, MYB, PSEN2 and ZNF593, in one or more cancer cells, tissues or organs of the mammal, wherein an altered or modulated relative expression level of the one or more overexpressed genes compared to the one or more underexpressed genes indicates or correlates with relatively increased or decreased responsiveness of the cancer to the immunotherapeutic agent.

[0341] In one embodiment the one or more overexpressed genes are selected from the group consisting of ADORA2B, CETN3, KCNG1, MAP2K5, STAU1 and TXN, and/or an expression level of one or more underexpressed genes are selected from the group consisting of BTN2A2, CAMSAP1, CARHSP1, GSK3B, HCFC1R1, and ZNF593.

[0342] In one embodiment, the one or more overexpressed genes are selected from the group consisting of ADORA2B, CD36, KCNG1, LAMA3, MAP2K5, NAE1, PGK1, STAU1, CFDP1, and SF3B3 and/or an expression level of one or more underexpressed genes are selected from the group consisting of APOBEC3A, BCL2, BTN2A2, CAMK4, FBXW4, PSEN2 and, MYB.

[0343] It would be understood for particular embodiments of the present aspect that one or more other overexpressed genes and/or one or more other underexpressed genes from one or more of a Carbohydrate/Lipid Metabolism metagene, a Cell Signalling metagene, a Cellular Development metagene, a Cellular Growth metagene, a Chromosome Segregation metagene, a DNA Replication/Recombination metagene, an Immune System metagene, a Metabolic Disease metagene, a Nucleic Acid Metabolism metagene, a Post-Translational Modification metagene, a Protein Synthesis/Modification metagene and a Multiple Networks metagene. such as those listed in Table 21, may be included in the step of comparing an expression level of one or more overexpressed genes and an expression level of one or more underexpressed genes.

[0344] Insofar as they relate to cancer, immunotherapy or immunotherapeutic agents use or modify the immune mechanisms of a subject so as to promote or facilitate treatment of a cancer. In this regard, immunotherapy or immunotherapeutic agents used to treat cancer include cell-based therapies, antibody therapies (e.g., anti-PD1 or anti-PDL1 antibodies) and cytokine therapies. These therapies all exploit the phenomenon that cancer cells often have subtly different molecules termed cancer antigens on their surface that can be detected by the immune system of the cancer subject. Accordingly, immunotherapy is used to provoke the immune system of a cancer patient into attacking the cancer's cells by using these cancer antigens as targets.

[0345] Non-limiting examples of immunotherapy or immunotherapeutic agents include adalimumab, alemtuzumab, basiliximab, belimumab, bevacizumab, BMS-936559, brentuximab, certolizumab, cituximab, daclizumab, eculizumab, ibritumomab, infliximab, ipilimumab, lambrolkizumab, mepolizumab, MPDL3280A muromonab, natalizumab, nivolumab, ofatumumab, omalizumab, pembrolizumab, pexelizumab, pidilizumab, rituximab, tocilizumab, tositumomab, trastuzumab, ustekinumab, abatacept, alefacept and denileukin diftitox. In particular preferred embodiments, the immunotherapeutic agent is an immune checkpoint inhibitor, such as an anti-PD1 antibody (e.g., pidilizumab, nivolumab, lambrolkizumab, pembrolizumab), an anti-PDL1 antibody (e.g., BMS-936559, MPDL3280A) and/or an anti-CTLA4 antibody (e.g., ipilimumab).

[0346] As would be appreciated by the skilled artisan, immune checkpoints refer to a variety of inhibitory pathways of the immune system that are crucial for maintaining self-tolerance and for modulating the duration and/or amplitude of an immune response in a subject. Cancers can use particular immune checkpoint pathways as a major mechanism of immune resistance, particularly against T cells that are specific for tumour antigens. Accordingly, immune checkpoint inhibitors include any agent that blocks or inhibits the inhibitory pathways of the immune system. Such inhibitors may include small molecule inhibitors or may include antibodies, or antigen binding fragments thereof, that bind to and block or inhibit immune checkpoint receptors or antibodies that bind to and block or inhibit immune checkpoint receptor ligands. By way of example, immune checkpoint receptors or receptor ligands that may be targeted for blocking or inhibition include, but are not limited to, CTLA-4, 4-1BB (CD137), 4-1BBL (CD137L), PDL1, PDL2, PD1, B7-H3, B7-H4, BTLA, HVEM, TIM3, GALS, LAG3, TIM3, B7H3, B7H4, VISTA, KIR, 2B4, CD160 and CGEN-15049. Illustrative immune checkpoint inhibitors include tremelimumab (CTLA-4 blocking antibody), anti-OX40, PD-L1 monoclonal Antibody (Anti-B7-H1; MEDI4736), MK-3475 (PD-1 blocker), nivolumab (anti-PD1 antibody), pidilizamab (CT-011; anti-PD1 antibody), BY55 monoclonal antibody, AMP224 (anti-PDL1 antibody), BMS-936559 (anti-PDL1 antibody), MPLDL3280A (anti-PDL1 antibody), MSB0010718C (anti-PDL1 antibody) and yervoy/ipilimumab (anti-CTLA-4 checkpoint inhibitor), albeit without limitation thereto.

[0347] In one embodiment, the method of predicting the responsiveness of a cancer to an immunotherapeutic agent, may further include the step of administering to the mammal a therapeutically effective amount of the immunotherapeutic agent.

[0348] In a related aspect is provided a method of predicting the responsiveness of a cancer to an EGFR inhibitor in a mammal, said method including the step of comparing an expression level of one or more overexpressed genes selected from the group consisting of NAE1, GSK3B, TAF2, MAPRE1, BRD4, STAU1, TAF2, PDCD4, KCNG1, ZNRD1-AS1, EIF4B, HELLS, RPL22, ABAT, BTN2A2, CD1B, ITM2A, BCL2, CXCR4, and ARNT2 and an expression level of one or more underexpressed genes selected from the group consisting of CD1C, CD1E, CD1B, KDM5A, BATF, EVL, PRKCB, HCFC1R1, CARHSP1, CHAD, KIR2DL4, ABHD5, ABHD14A, ACAA1, SRPK3, CFB, ARNT2, NDUFC1, BCL2, EVL, ULBP2, BIN3, SF3B3, CETN3, SYNCRIP, TAF2, CENPN, ATP6V1C1, CD55 and ADORA2B in one or more cancer cells, tissues or organs of the mammal, wherein an altered or modulated relative expression level of the one or more overexpressed genes compared to the one or more underexpressed genes indicates or correlates with relatively increased or decreased responsiveness of the cancer to the EGFR inhibitor.

[0349] It would be appreciated that the EGFR inhibitor may be any known in the art, including monoclonal antibody and small molecule inhibitors thereof, such as those hereinbefore described. In particular embodiments, the EGFR inhibitor is or comprises erlotinib and/or cetuximab.

[0350] In certain embodiments, the cancer is or comprises lung cancer, colorectal cancer or breast cancer.

[0351] In one embodiment, the one or more overexpressed genes are selected from the group consisting of NAE1, GSK3B, and TAF2 and/or the one or more underexpressed genes are selected from the group consisting of CD1C, CD1E, CD1B, KDM5A, BATF, EVL, PRKCB, HCFC1R1, CARHSP1, CHAD, KIR2DL4, ABHD5, ABHD14A, ACAA1, SRPK3, and CFB.

[0352] In one embodiment, the one or more overexpressed genes are selected from the group consisting of MAPRE1, BRD4, STAU1, TAF2, GSK3B, PDCD4, KCNG1, ZNRD1-AS1, EIF4B and HELLS and/or the one or more underexpressed genes are selected from the group consisting of ARNT2, NDUFC1, BCL2, ABHD14A, EVL, ULBP2, and BINS.

[0353] In one embodiment, the one or more overexpressed genes are selected from the group consisting of RPL22, ABAT, BTN2A2, CD1B, ITM2A, BCL2, CXCR4, and ARNT2 and/or the one or more underexpressed genes are selected from the group consisting of SF3B3, CETN3, SYNCRIP, TAF2, CENPN, ATP6V1C1, CD55 and ADORA2B.

[0354] In a related aspect is provided a method of predicting the responsiveness of a cancer to a multikinase inhibitor in a mammal, said method including the step of comparing an expression level of one or more overexpressed genes selected from the group consisting of SCUBE, CHPT1, CDC1, BTG2, ADORA2B and BCL2, and an expression level of one or more underexpressed genes selected from the group consisting of NOP2, CALR, MAPRE1, KCNG1, PGK1, SRPK3, RERE, ADM, LAMA3, KIR2DL4, ULBP2, LAMA4, CA9, and BCAP31, in one or more cancer cells, tissues or organs of the mammal, wherein an altered or modulated relative expression level of the one or more overexpressed genes compared to the one or more underexpressed genes indicates or correlates with relatively increased or decreased responsiveness of the cancer to the EGFR inhibitor.

[0355] Multikinase inhibitors typically work by inhibiting multiple intracellular and/or cell surface kinases, some of which may be implicated in tumor growth and metastatic progression of a cancer, thus decreasing tumor growth and replication. It would be appreciated that the multikinase inhibitor may be any known in the art, including small molecule inhibitors, such as those hereinbefore described. Non-limiting examples of multikinase inhibitors include sorafenib, trametinib, dabrafenib, vemurafenib, crizotinib, sunitinib, axitinib, ponatinib, ruxolitinib, vandetanib, cabozantinib, afatinib, ibrutinib and regorafenib. In a particular embodiment, the multikinase inhibitor is or comprises sorafenib.

[0356] In one embodiment, the cancer is or comprises lung cancer.

[0357] Suitably, with regard to predicting the responsiveness of a cancer to an immunotherapeutic agent, an EGFR inhibitor or a multikinase inhibitor, a higher relative expression level of the one or more overexpressed genes compared to the one or more underexpressed genes indicates or correlates with a relatively increased responsiveness of the cancer to the agent or inhibitor; and/or a lower relative expression level of the one or more overexpressed genes compared to the one or more underexpressed genes indicates or correlates with a relatively decreased responsiveness of the cancer to the agent or inhibitor.

[0358] In a further aspect, the invention provides a method for identifying an agent for use in the treatment of cancer including the steps of:

[0359] (i) contacting a protein product of GRHPR, NDUFC1, CAMSAP1, CETN3, EIF3K, STAU1, EXOSC7, COG8, CFDP1 and/or KCNG1 with a test agent; and

[0360] (ii) determining whether the test agent, at least partly, reduces, eliminates, suppresses or inhibits the expression and/or an activity of the protein product.

[0361] Suitably, the cancer is of a type hereinbefore described, albeit without limitation thereto. Preferably, the cancer has an overexpressed gene selected from the group consisting of GRHPR, NDUFC1, CAMSAP1, CETN3, EIF3K, STAU1, EXOSC7, COG8, CFDP1 and KCNG1 and any combination thereof, Suitably, the agent possesses or displays little or no significant off-target and/or nonspecific effects.

[0362] Preferably, the agent is an antibody or a small organic molecule.

[0363] In embodiments relating to antibody inhibitors, the antibody may be polyclonal or monoclonal, native or recombinant. Well-known protocols applicable to antibody production, purification and use may be found, for example, in Chapter 2 of Coligan et al., CURRENT PROTOCOLS IN IMMUNOLOGY (John Wiley & Sons NY, 1991-1994) and Harlow, E. & Lane, D. Antibodies: A Laboratory Manual, Cold Spring Harbor, Cold Spring Harbor Laboratory, 1988, which are both herein incorporated by reference.

[0364] Generally, antibodies of the invention bind to or conjugate with an isolated protein, fragment, variant, or derivative of the protein product of one or more of GRHPR, NDUFC1, CAMSAP1, CETN3, EIF3K, STAU1, EXOSC7, COG8, CFDP1 and KCNG1. For example, the antibodies may be polyclonal antibodies. Such antibodies may be prepared for example by injecting an isolated protein, fragment, variant or derivative of the protein product into a production species, which may include mice or rabbits, to obtain polyclonal antisera. Methods of producing polyclonal antibodies are well known to those skilled in the art. Exemplary protocols which may be used are described for example in Coligan et al., CURRENT PROTOCOLS IN IMMUNOLOGY, supra, and in Harlow & Lane, 1988, supra.

[0365] Monoclonal antibodies may be produced using the standard method as for example, described in an article by Köhler & Milstein, 1975, Nature 256, 495, which is herein incorporated by reference, or by more recent modifications thereof as for example, described in Coligan et al., CURRENT PROTOCOLS IN IMMUNOLOGY, supra by immortalizing spleen or other antibody producing cells derived from a production species which has been inoculated with one or more of the isolated protein products and/or fragments, variants and/or derivatives thereof.

[0366] Typically, the inhibitory activity of candidate inhibitor antibodies may be assessed by in vitro and/or in vivo assays that detect or measure the expression levels and/or activity of the protein products of one or more of GRHPR, NDUFC1, CAMSAP1, CETN3, EIF3K, STAU1, EXOSC7, COG8, CFDP1 and KCNG1 in the presence of the antibody.

[0367] In embodiments relating to small organic molecule inhibitors, this may involve screening of large compound libraries, numbering hundreds of thousands to millions of candidate inhibitors (chemical compounds including synthetic, small organic molecules or natural products, for example) which may be screened or tested for biological activity at any one of hundreds of molecular targets in order to find potential new drugs, or lead compounds. Screening methods may include, but are not limited to, computer-based (“in silico”) screening and high throughput screening based on in vitro assays.

[0368] Typically, the active compounds, or “hits”, from this initial screening process are then tested sequentially through a series of other in vitro and/or in vivo tests to further characterize the active compounds. A progressively smaller number of the “successful” compounds at each stage are selected for subsequent testing, eventually leading to one or more drug candidates being selected to proceed to being tested in human clinical trials.

[0369] At the clinical level, screening a test agent may include obtaining samples from test subjects before and after the subjects have been exposed to a test compound. The levels in the samples of the protein product of the overexpressed genes may then be measured and analysed to determine whether the levels and/or activity of the protein products change after exposure to a test agent. By way of example, protein product levels in the samples may be determined by mass spectrometry, western blot, ELISA and/or by any other appropriate means known to one of skill in the art. Additionally, the activity of the protein products, such as their enzymatic activity, may be determined by any method known in the art. This may include, for example, enzymatic assays, such as spectrophotometric, fluorometric, calorimetric, chemiluminescent, light scattering, microscale thermophoresis, radiometric and chromatographic assays.

[0370] It would be appreciated that subjects who have been treated with test agents may be routinely examined for any physiological effects which may result from the treatment. In particular, the test agents will be evaluated for their ability to decrease cancer likelihood or occurrence in a subject. Alternatively, if the test agents are administered to subjects who have previously been diagnosed with cancer, they will be screened for their ability to slow or stop the progression of the cancer as well as induce disease remission.

[0371] In a particular embodiment, the invention may provide a “companion diagnostic” whereby the one or more genes that are detected as having elevated expression are the same genes that are targeted by the anti-cancer treatment.

[0372] In a related aspect, the invention provides an agent for use in the treatment of cancer identified by the method hereinbefore described.

[0373] Suitably, the cancer is of a type hereinbefore described, albeit without limitation thereto. Preferably, the cancer has an overexpressed gene selected from the group consisting of GRHPR, NDUFC1, CAMSAP1, CETN3, EIF3K, STAU1, EXOSC7, COG8, CFDP1, KCNG1 and any combination thereof.

[0374] In another related aspect, the invention provides a method of treating a cancer in a mammal, including the step of administering to the mammal a therapeutically effective amount of an agent hereinbefore described.

[0375] In this regard, test agents that are identified of being capable of reducing, eliminating, suppressing or inhibiting the expression level and/or activity of a protein product of GRHPR, NDUFC1, CAMSAP1, CETN3, EIF3K, STAU1, EXOSC7, COG8, CFDP1 and/or KCNG1 may then be administered to patients who are suffering from or are at risk of developing cancer. For example, the administration of a test agent which inhibits or decreases the activity and/or expression of the protein product of one or more of the aforementioned genes may treat the cancer and/or decrease the risk cancer, if the increased activity of the biomarker is responsible, at least in part, for the progression and/or onset of the cancer.

[0376] Suitably, the cancer is of a type hereinbefore described, albeit without limitation thereto. Preferably, the cancer has an overexpressed gene selected from the group consisting of GRHPR, NDUFC1, CAMSAP1, CETN3, EIF3K, STAU1, EXOSC7, COG8, CFDP1, KCNG1 and any combination thereof.

[0377] All computer programs, algorithms, patent and scientific literature referred to herein is incorporated herein by reference.

[0378] For the present invention, the database accession number or unique identifier provided herein for a gene or a protein, such as those presented in Tables 4, 5, 10, 15, 16, 17 and 18, as well as the gene and/or protein sequence or sequences associated therewith, are incorporated by reference herein.

[0379] So that preferred embodiments of the invention may be fully understood and put into practical effect, reference is made to the following non-limiting examples.

### Example 1

### Materials and Methods

### Meta-Analysis of Global Gene Expression in TNBC

[0380] We performed a meta-analysis of global gene expression data in the Oncomine™ database¹⁹ (Compendia Bioscience, MI) using a primary filter for breast cancer (130 datasets), sample filter to use clinical specimens and dataset filters to use mRNA datasets with more than 151 patients (22 datasets). Patients of all ages, gender, disease stages or treatments were included. Three additional filters were applied to perform three independent differential analyses: (1) triple negative (TNBC cases vs. non-TNBC cases, 8 datasets⁴⁹⁻⁵⁶; (2) metastatic event analysis at 5 years (metastatic events vs. no metastatic events, 7 datasets^{53,54,57-61}) and (3) survival at 5 years (patients who died vs. patients who survived, 7 datasets^{49,54,56,58,61-63}). Deregulated genes were selected based on the median p-value of the median gene rank in overexpression or underexpression patterns across the datasets (FIG. 8). The union of these three deregulated gene lists resulted in a gene list of deregulated genes in aggressive breast cancers (FIG. 9). The METBRIC dataset²¹ was used as the validation set for further analysis. The normalized z-score expression data of the METABRIC dataset was extracted from Oncomine™ and imported into BRB-ArrayTools⁶⁴ (V4.2, Biometric Research Branch, NCI, Maryland, USA) with built in R Bioconductor packages. Survival curves for the METABRIC dataset were constructed using GraphPad® Prism v6.0 (GraphPad Software, CA, USA) and the Log-rank (Mantel-Cox) Test was used for statistical comparisons of survival curves.

### Ingenuity Pathway Analysis and Derivation of the Eight Gene List

[0381] Pathway analysis was performed using the Ingenuity Pathway Analysis® (Ingenuity Systems®, CA). For pathway analysis in IPA®, we used only direct relationships. After pathway analysis, we set to identify the minimum gene list that recapitulates the aggressiveness 206 gene list. We used the METABRIC dataset to perform statistical filtering in the BRB-ArrayTools software to derive the minimum gene list as follows: (1) the correlation of each gene in the CIN metagene and the ER metagene to the metagene itself was determined by quantitative trait analysis using the Pearson's correlation coefficient (univariate p-value threshold of 0.001); (2) the association of each gene with overall survival using univariate Cox proportional hazards model (univariate test p-value <0.001); and (3) the fold-change of gene expression between high aggressiveness score tumors and low aggressiveness score tumors was calculated for each gene. We selected genes with Pearson's correlation coefficient >0.7 to the metagenes, strongest survival association and more than 2-fold deregulation between high and low agressiveness score tumors. The METABRIC dataset and four publically available datasets were used to validate the 8-genes score. The four datasets (GSE25066⁵³, GSE3494⁶⁵, GSE2990¹⁵, GSE2034⁶⁶) were analyzed as described previously⁶⁷.

### Cell Culture and Drug Treatments

[0382] Breast cancer cell lines were obtained from ATCC™ (VA, USA) and cultured as per ATCC™ instructions. All cell lines were regularly tested for mycoplasma and authenticated using STR profiling. For the siRNA screen, siRNA solutions (Shanghai Gene Pharma, China) were used to transfect cells (MDA-MB-231, SUM159PT and Hs578T) with 10 nM of respective siRNA using Lipofectamine® RNAiMAX (Life Technologies, CA, USA). For drug treatments, docetaxel and the TTK inhibitor AZ3146 were purchased from Selleck Chemicals LLC (TX, USA) and diluted in DMSO. Six days after siRNA knockdown or after drug treatments the survival of cells in comparison to control was determined using the CellTiter 96® Assay as per manufacturer instructions (Promega Corporation, WI, USA). For immunoblotting, standard protocols were used and membranes were probed with antibodies against TTK (anti-MPS1 mouse monoclonal antibody [N1] ab11108 (Abcam, Cambridge), and γ-tubulin (Sigma-Aldrich®) then developed using chemiluminescence reagent plus (Milipore, MA, USA). Flow cytometry to quantify apoptosis was performed using Annexin V-Alexa₄₈₈ and 7-AAD (Life Technologies) as per manufacturer instruction using BD FACSCanto II™ flow cytometer (BD Biosciences, CA, USA).

### Breast Cancer Tissue Microarrays, Immunohistochemical and Survival Analysis

[0383] The Brisbane Breast Bank collected fresh breast tumor samples from consenting patients; the study was approved by the local ethics committees. Tissue microarrays (TMAs) were constructed from duplicate cores of formalin-fixed, paraffin-embedded (FFPE) breast tumor samples from patients undergoing resection at the Royal Brisbane and Women's Hospital between 1987 and 1994. For biomarker analysis, whole tumor sections or TMAs (depending on the marker) were stained with antibodies against ER, PR, Ki67, HER2, CK5/6, CK14, EGFR and TTK (Table 8), and scored by trained Pathologists. The Vectastain® Universal ABC kit (Vector laboratories, CA) was used for signal detection according to the manufacturer's instructions. Stained sections were scanned at high resolution (ScanScope Aperio, Leica Microsystems, Wetzlar, Germany), and then images were segmented into individual cores for analysis using Spectrum software (Aperio). Survival and other clinical data were collected from the Queensland Cancer Registry and original diagnostic Pathology reports, and in addition we performed an internal histopathological review (SRL) of representative tumor sections from each case, stained with H&E. For analysis of HER2-amplification TMAs were analyzed using HER2 CISH. Criteria for assigning prognostic subgroups in this study are summarized in FIG. 14.

### Other Statistical Analysis

[0384] Statistical analyses were prepared using GraphPad® Prism v6.0. The types of tests used are stated in Figure Legends. Univariate and multivariate Cox proportional hazards regression analyses were performed using MedCalc for Windows, version 12.7 (MedCalc Software, Ostend, Belgium).

### Results

### Meta-Analysis of Gene Expression Profiles in TNBC

[0385] We performed a meta-analysis of published gene expression data, irrespective of platform, using the Oncomine™ database¹⁹ (version 4.5). We compared the expression profiles of 492 TNBC cases vs. 1382 non-TNBC cases in 8 datasets and found 1600 overexpressed and 1580 underexpressed genes in the TNBC cases (cutoff median p-value across the 8 datasets <1×10⁻⁵ from a Student's t-test, FIG. 8). We also compared the expression profiles of primary breast cancers from 512 patients who developed metastases vs. 732 patients who did not develop metastases at 5 years (7 datasets in total) to identify 500 overexpressed and 480 underexpressed genes in the metastasis cases (cutoff median p-value across the 7 datasets <0.05 from a Student's t-test, FIG. 8). Finally, we compared the expression profiles of 232 primary breast tumors from patients who died within 5 years vs. 879 patients who survived in 7 datasets and found 500 overexpressed and 500 underexpressed genes in the poor survivors (cutoff median p-value across the 7 datasets <0.05 from a Student's t-test, FIG. 8). The union of these analyses—genes deregulated in TNBC and in tumors that metastasized or resulted in death within 5 years—generated a gene list of 305 overexpressed and 341 underexpressed genes (FIGS. 9A&B). The deregulated genes from our analyses did not consider deregulation in comparison to normal breast tissue. To identify cancer-related genes, we used the METABRIC (Molecular Taxonomy of Breast Cancer International Consortium) dataset²¹ as a validation dataset. Of the 305 overexpressed and 341 underexpressed genes identified in the meta-analysis, 117 overexpressed and 89 underexpressed genes (206 genes) were deregulated in TNBC (250 cases) vs. 144 adjacent normal tissue (1.5 fold-change cutoff; FIGS. 9C&D).

### Clinicopathological Features of the Aggressiveness Gene List

[0386] We compared the 206 genes from the above analysis, we called the “aggressiveness gene list” (Table 4), to the recently described metagene attractors^{16,17} and found that 45 of the overexpressed genes were in the CIN metagene, whereas 19 of the underexpressed genes were in the ER metagene (FIG. 10). The expression of the aggressiveness gene list was visualized in the METABRIC dataset, stratified according to the histological subtypes by the GENUIS classification²². As shown in FIG. 1A, ER⁻/HER2⁻ (TNBC), in comparison to adjacent normal breast tissue, showed the highest upregulation of CIN genes (red in the heat map) and downregulation of ER signaling genes (green in the heat map). Tumors of other subtypes showed a range of deregulation of these genes. To quantify these trends, we calculated the “aggressiveness score” as the ratio of the CIN metagene (average of expression of CIN genes) to the ER metagene (average of expression of ER genes). The aggressiveness score was highest for ER⁻/HER⁻ (TNBC), followed by HER2⁺ then ER⁺ tumors (box plot in FIG. 1). We also analyzed the aggressiveness score in the five intrinsic breast cancer subtypes predefined by the PAM50 classification′ and the ten integrative clustering (intClust) subtypes defined by combined clustering of gene expression and copy number data subtypes²¹ (FIG. 11). The aggressiveness score was highest in the basal-like and the intClust 10 subtypes which are enriched for TNBC and have poor prognosis.

[0387] Interestingly, tumors of various subtypes scored higher than the median aggressiveness score (line in box plots in FIG. 1 and FIG. 11). To this end, we examined the overall survival of patients in the METABRIC dataset stratified by quartiles and also dichotomized by the median of the aggressiveness score. Tumors with high aggressiveness score had worse survival than those with low aggressiveness score. The survival of patients with non-TNBC tumors with high aggressiveness score had poor survival that was similar to TNBC patients (FIG. 1B). Among ER⁺ tumors we found that high aggressiveness score predicted poor survival in both Grade 2 (FIG. 1B) and Grade 3 (FIG. 11) tumors. Tumors with high aggressiveness score showed poor survival regardless of the PAM50 intrinsic breast cancer subtypes (FIG. 11). The PAM50 classifier was prognostic only in low aggressiveness score tumors (FIG. 12).

One Network of Direct Interactions in the Aggressiveness Gene List Associates with Patient Survival

[0388] We performed network analysis on the aggressiveness gene list using the Ingenuity Pathway Analysis (IPA®) and found a network with direct interactions between 97 of the 206 deregulated genes (FIG. 2A). To find the minimal genes that represent the aggressiveness genes and this network, the 97 genes in this network were analyzed for their correlation with the CIN or ER metagenes and overall survival in the METABRIC dataset (Table 5). We selected genes according to the following criteria: (1) highest correlation with the metagenes (Pearson's correlation coefficient >0.7); (2) association with overall survival (Cox proportional hazards model, p<0.001), and (3) more than 2-fold deregulation with least standard deviation of expression between high and low aggressiveness score tumors. These analyses identified two genes from the ER metagene (MAPT and MYB) and six genes from the CIN metagene (MELK, MCM10, CENPA, EXO1, TTK and KIF2C). These 8 genes were maintained in a directly connected network (FIG. 2B). The classification of tumors (high vs. low across the median) from these eight genes, again representing the ratio of CIN and ER metagenes, predicted the classification from the 206 genes with 95% sensitivity and 97% specificity by prediction of microarray (PAM) analysis (data not shown). Importantly, a high score from these eight genes identified poor survival in all patients, non-TNBC patients and ER⁺ Grade 2 (FIG. 2C).

[0389] Next, we explored the 8-genes score for prognosis in several molecular and histological settings in the METABRIC dataset. The survival of patients with tumors with wild-type TP53 were stratified by the 8-genes score (FIG. 3A). Patients with mutant TP53, which were mainly of high score, showed worse survival than those with wild-type TP53, suggesting that TP53 mutation is an independent prognostic factor. Patients with tumors with low or high expression of the proliferation marker Ki67 were stratified by the 8-genes score suggesting that the 8-genes score is independent of proliferation (FIG. 3A). We also found that the 8-genes score stratified the survival of patients from all stages of disease (Stage I-Stage III, FIG. 3A). We focused on ER⁺ and found that, as in the case of ER⁺ Grade 2 tumors (FIG. 2C); the 8-genes score stratified the survival of patients with ER⁺ Grade 3 tumors (FIG. 3B). Importantly, the 8-genes score identified ER⁺LN⁻ and ER⁺LN⁺ patients who had poor survival similar to ER⁻LN⁻ and ER⁻LN⁺ patients, respectively (FIG. 3B). High 8-genes score identified poor survival of patients with tumors of all PAM50 subtypes and the prognostication by PAM50 classification was only evident in low 8-genes score tumors (FIG. 12).

### The 8-Genes Aggressiveness Score in Multivariate Survival Analysis

[0390] To exclude the possibility that the aggressiveness score—calculated using the 206 genes or the 8 genes—was redundant; we performed multivariate Cox-proportional hazards model analysis in the METABRIC dataset (with Illumina platform) in comparison to conventional clinical variables and current gene signatures. As detailed in Table 1, the aggressiveness scores significantly associated with patient survival when compared with conventional variables and outperformed MammaPrint⁹, OncotypeDx^{10,11}, proliferation/cell cycle^{16,20} and CIN²⁰ signatures. Moreover, our aggressiveness scores outperformed the CIN4 classier²³ which was recently developed from the CIN signature.

[0391] We validated the six CIN and two ER genes in univariate survival association using the online tool Kaplan-Meier (KM)-plotter²⁴ (Tables 6 & 7) which has the gene expression and survival data of more than 2000 patients (but are not part of the METABRIC dataset). We found that the collective expression of the six overexpressed genes (MELK, MCM10, CENPA, EXO1, TTK and KIF2C) significantly associated with relapse free survival (RFS) and distant metastasis free survival (DMFS) in all patients, ER⁺ patients, lymph node negative (LN⁻) or positive (LN⁺) patients (Table 6). The two underexpressed genes (MAPT and MYB) also significantly associated with RFS and DMFS in these patient groups (Table 7).

[0392] More importantly, we performed multivariate survival analysis of the 8-genes score in four datasets (with Affymetrix platform from the Gene Expression Omnibus [GEO]; GSE2990, GSE3494, GSE2034 and GSE25066). Again, the score was significantly associated with survival in a multivariate Cox-proportional hazards model in every dataset tested (FIG. 4). Altogether, we found that in multiple datasets that used different platforms, the 8-genes score identified patients with poor survival independently of other clinico-pathologic indicators and outperforming current signatures.

### Therapeutic Targets in the Aggressiveness Gene List

[0393] The overexpressed genes in the CIN metagene are involved in or regulate mitosis, spindle assembly and checkpoint, kinetochore attachment, chromosome segregation and mitotic exit. Thus it is not surprising that several of the overexpressed genes are targets for molecular inhibitors, such as CDK1^{25,26} and AURKA/AURKB²⁷ and have been trialed pre-clinically and clinically²⁸. To this end, we performed siRNA depletion against 25 genes of the CIN metagene in three TNBC cell lines, MDA-MB-231, SUM159PT and Hs578T. We found that knockdown of four genes (11K, TPX2, NDC80 and PBK) consistently affected the survival of these cells (FIG. 5A and Table 5). The knockdown of TTK showed the worst survival and since it was in the 8-genes score we selected TTK for further studies. We found that TTK protein was higher in TNBC cell lines compared to the near-normal MCF10A cell line, and luminal/HER2 cell lines (FIG. 5B). Next, we used the specific TTK inhibitor (TTKi), AZ3146, against a panel of breast cancer cell lines and found that TNBC cell lines were more sensitive to the TTKi (FIG. 5C).

### TTK Expression in Aggressive Tumors and Potential for Combination Therapy

[0394] To further study the potential of TTK as therapeutic target, we investigated TTK expression at the mRNA and protein levels in breast cancer patients. We analyzed the correlation of TTK mRNA expression, dichotomized at the median, with clinicopathological indicators in the METABRIC dataset of 2000 patients (Table 2). High TTK mRNA expression associated with younger age of tumor diagnosis, larger tumor size, higher tumor grade, higher Ki67 expression, TP53 mutations, an ER/PR negative tumor phenotype, HER2 positivity and TNBC. Based on PAM50 subtyping, high TTK mRNA was associated with luminal B, HER2-enriched and basal-like tumors.

[0395] We also analyzed TTK expression in a cohort of breast cancer patients (406 patients) by IHC. TTK and its activity is detected at all stages of the cell cycle, however, it is upregulated during mitosis²⁹. Thus, we observed TTK staining in non-mitotic cells to define high TTK levels (score of 3) in order to exclude the bias of elevated TTK level during mitosis. Similar to TTK mRNA, high TTK protein level (Table 3) associated with high tumor grade, high Ki67 expression and TNBC status (particularly basal TNBC). Moreover, in agreement with the TTK mRNA associations with the PAM50 intrinsic subtypes, high TTK protein was observed in HER2-positive and proliferative ER⁺/HER2⁻ tumors (most related to luminal B) but low TTK protein in non-proliferative ER⁺/HER2⁻ tumors (most related to luminal A). In addition to these associations with aggressive phenotypes, we also found that high TTK protein significantly associated with aggressive histological features including ductal histology, pushing tumor border, lymph node involvement, nuclear pleomorphism, lymphocytic infiltration and higher mitotic scores (Table 3). Altogether, like the high aggressiveness score from the 206 or 8 genes, high level of TTK mRNA and protein span across breast cancer subtypes marking aggressive behavior.

[0396] We examined the association of TTK protein level with patient survival and found that breast tumors with high TTK staining (category 3) had worse survival than other staining groups at 5 years (FIGS. 6A&B) and 10 and 20 years (FIG. 13). Importantly, high TTK staining (category 3) was not restricted to a particular histological subgroup or to tumors with high mitotic index (FIG. 6C). Next, we focused on prognostication of aggressive subgroups (Grade 3, lymph node positive, TNBC, HER2 or high Ki67) and found that high TTK protein level identified exceptionally aggressive tumors that lead to poor survival of less than 2 years (FIG. 7A). Finally, to exploit our finding that TTK, as a part of the aggressiveness score, was associated with aggressive breast tumors and that TTK inhibition was effective in TNBC cell lines that overexpress this protein (FIG. 5), we investigated the therapeutic potential of combining TTK inhibition with chemotherapy. We found that TTKi synergized with docetaxel at very low (sub-lethal doses) in the treatment of TNBC cell lines which overexpress TTK in comparison to cell lines which do not (FIG. 7B) and that this combination induced apoptotic cell death (FIG. 7C).

### CIN Metagene and ER Metagenes in Lung Adenocarcinoma

[0397] There is also reason to believe that the metagene signature may work for other cancers, such as lung cancer. FIG. 15 provides overall survival curves of lung cancer patients split by ten (10) CIN genes that include the aforementioned six (6) (genes as well as CENPN, CEP55, FOXM1 and TPX2; and the two (2) ER genes MAPT and MYB as a signature; patients are low or high according to the median of the signature. The signature outperformed tumour grade and disease stage and remained significant when adjusted for AJCC T (size) and N (lymph node) stages (tumour size (T stage) and lymph node status (N stage) in multivariate Cox regression analysis in lung cancer patients (Table 9). In particular, the signature was prognostic in lung adenocarcinoma. The prognostication of lung adenocarcinoma was significant even when including a minimal gene set of 6 CIN genes and 2 ER genes.

[0398] In FIG. 16A we show the global gene expression (by RNAseq) of the breast cancer patients in the TCGA dataset. From these data the 8-genes score (Aggressiveness score) and the OncotypeDx (Recurrence score) were investigated for association with survival. The 8-genes score stratified breast cancer survival better than the OncotypeDx (FIG. 16B). Further, the 8-genes score (Aggressiveness score) identified tumours with high genomic copy number variations involving whole chromosome arms deletions and duplications reflecting aneuploidy (FIG. 16C).

[0399] We also find that the 8-genes score (Aggressiveness score) stratifies the survival of all cancers collectively in the TCGA data better than the OncotypeDx (FIG. 17) and that the 8-genes score (Aggressiveness score) was prognostic in each of the tested cancers (FIG. 18). Similarly, as in breast cancer (FIG. 16C), the 8-genes score (Aggressiveness score) identified tumors of all cancer types with high genomic copy number variations involving whole chromosome arms deletions and duplications reflecting aneuploidy (data not shown). These cancer types include breast cancer, bladder cancer, colorectral cancer, glioblastoma, lower grade glioma, head & neck cancer, kidney cancer, liver cancer, lung adenocarcinoma, abute myeloid leukaemia, pancreatic cancer and lung squamous cell carcinoma.

### DISCUSSION

[0400] This meta-analysis of gene expression in the Oncomine™ database identified a list of 206 was enriched with two core biological functions/metagenes; chromosomal instability (CIN) and ER signaling. We calculated the aggressiveness score, the ratio of CIN to ER metagenes, which associated with overall survival of breast cancer. A core of eight genes (six CIN genes and two ER signaling genes) was representative and recapitulated the correlations with outcome from the 206 genes. The score from the six CIN genes to the 2 ER signaling genes, 8-genes score, associated with survival in several breast cancer datasets. Our aggressiveness scores outperformed conventional variable and published signatures in multivariate survival analysis. Particularly in ER⁺ tumors, some cases have survival as poor as that of the aggressive HER2⁺ and TNBC subtypes. Our data suggest that the interplay of cancer-related biological functions, namely CIN and ER signaling, are better predictors of phenotypes than single genes or single functions. This notion is in line with recent studies showing that the interaction of biologically-driven predictors provide better prognosis^{16,17,30}. Recently, all ER⁻ tumors were described to have a high level of CIN metagene, however, it was not clear that ER⁺ tumors could be described as low CIN tumors¹⁶. In our study, we clarify that ER⁺ disease contains a considerable fraction of tumors that have high level of CIN genes and that the relationship between CIN and ER genes is a powerful predictor of survival in these patients.

[0401] The fidelity of chromosome segregation is ensured by the proper attachment of the microtubules from the mitotic spindle to the kinetochores of chromosomes in a tightly regulated process and CIN refers to the missegregation of whole chromosomes thus producing aneuploidy³¹. Using aneuploidy as a surrogate marker for CIN, Carter et al developed a gene signature and found that this “CIN signature” predicts clinical outcome in multiple cancers²⁰. More recently, a minimal gene set that captures the CIN signature, CIN4 (AURKA, FOXM1, TOP2A and TPX2) was described as the first clinically applicable qPCR derived measure of tumor aneuploidy from FFPE tissue. Since Grade 2 tumors heterogeneous characteristics in terms of clinical outcome, the significance of the CIN4 classier is the stratification of Grade 2 tumors into good and poor prognosis groups²³. Our aggressiveness scores were prognostic in all tumor grades and disease stages (stages I-III and lymph node negative and positive) and outperformed the CIN signature and the CIN4 classier in multivariate survival analysis in the METABRIC dataset. Strikingly, but in agreement with previous studies^{32,33}, the prognostication using the CIN metagene and our aggressiveness scores from gene expression levels were restricted to ER⁺ disease but not in the TNBC or HER2 subtypes. This may be explained that ER⁻ tumors have a high level of CIN metagene as per our results and published previously¹⁶. However, our results with TTK protein level clearly demonstrate that TNBC, HER2, high grade, lymph node positive and proliferative tumors contain subgroups with high TTK levels exclusive of mitotic cells and have poorer survival than those with low TTK expression or TTK expression in mitotic cells. We propose that there are two types of high expression of CIN genes that may not be clearly differentiated by mRNA expression studies. One form of elevated CIN genes relates to high level of mitosis and proliferation whereas the second form that we measured by IHC exclusive of mitotic cells is driven by another aggressive phenotype; protection of aneuploidy and genomic instability. The recent study of the CIN4 classifier lends support to our proposition. In this study, using flow cytometry to measure aneuploidy by DNA content, the authors found that a substantial proportion of tumors with high CIN4 scores have a normal DNA ploidy and that a significant proportion of aneuploid cases had low CIN4 score²³.

[0402] Chromosome missegregation and aneuploidy enhance genetic recombination and defective DNA damage repair³⁴ to drive a “mutator phenotype” required for oncogenesis³⁵. Genomic instability caused by deregulated mitotic spindle assembly checkpoint (SAC) and aneuploidy has been termed “non-oncogene addiction”^{36,37}. It is tempting to suggest that CIN and aneuploidy are exploited by breast cancer stem cells which are high in TNBC³⁸ due to the link between cancer stem cells, aneuploidy and therapy resistance^{39,40}. This is supported by studies that implicate several genes involved in the SAC and chromosome segregation in tumor initiation, progression and cancer stem cells, e.g. AURKA in ovarian cancer⁴¹, MELK/FOXM1 in glioblastoma^{42,43}, MELK⁴⁴ and MAD2⁴⁵ in breast cancer and SKP2 in several cancers⁴⁶. The role of CIN genes to protecting aneuploidy could provide an insight to the paradox that TNBC show a better response to chemotherapy due to higher level of proliferation, yet these tumors have poorer outcome. We propose that resistance in TNBC could be attributed to the ability of aneuploid cells to adapt and drive recurrence. At least in vivo, chemotherapy has been shown to induce the proliferation quiescent aneuploid cells as a mechanism for therapy resistance³⁹. We envisage that the high level of the CIN metagene in TNBC, particularly genes involved in chromosome segregation, is protective of this state. Indeed, one study found that a high level of TTK is protective of aneuploidy in breast cancer cells and its silencing reduces the tumorigenicity of breast cancer cell lines in vivo⁴⁷. Our results from the patient cohort demonstrate that high TTK protein expression exclusive of mitosis was indeed prognostic aggressive tumors and support the concept that protection from aneuploidy and genomic instability is an aggressive phenotype that drives poor outcome.

[0403] Our results with the TTK molecular inhibitor, in agreement with published studies using siRNA depletion^{47,48}, supports the idea of targeting chromosomal segregation in tumors with a high CIN phenotype as a therapeutic strategy. We also suggest that while TTK is high in TNBC as previously described^{47,48}, a considerable proportion of non-TNBC tumors that display aggressive features also show an elevated level of CIN genes, and would benefit from such targeted therapies. To our knowledge the combination of sub-lethal doses of taxanes with TTK inhibition has not been investigated so far in breast cancer, but in other cancers^{33,50-53}. Our results reveal that TTK inhibition indeed sensitizes breast cancer cells with high TTK to docetaxel.

[0404] Referring particularly in FIGS. 16-18, as well as the 8-genes score (Aggressiveness score) being prognostic for the survival of cancer patients after treatment, the aggressiveness score also identifies tumors with high copy number variations involving whole chromosome arms reflecting aneuploid status. Thus, the aggressiveness score may also serve as a companion diagnostic for drugs that target aneuploidy by means of targeting genes listed in Table 4, inclusive of the 8 genes used to produce the aggressiveness score (such as TTK⁶⁷⁻⁷⁰) or by other drugs that target the aneuploidy state (such as PLK1^{71,72} or others⁷³⁻⁷⁶).

[0405] In conclusion, our study emphasizes that classification of breast cancer based on biological phenotypes facilitates understanding the drivers of oncogenic phenotypes and therapeutic potentials. Importantly, our studies demonstrate that IHC assessment of CIN genes, exemplified by TTK here; provide better characterization and understanding for the contribution of CIN to tumor aggressiveness and prognosis.

[0406] Throughout this specification, the aim has been to describe the preferred embodiments of the invention without limiting the invention to any one embodiment or specific collection of features. Various changes and modifications may be made to the embodiments described and illustrated herein without departing from the broad spirit and scope of the invention.

[0407] All computer programs, algorithms, patent and scientific literature referred to herein is incorporated herein by reference in their entirety.

### REFERENCES

[0408] 1. Liedtke C, Mazouni C, Hess K R, Andre F, Tordai A, Mejia J A et al. Response to neoadjuvant therapy and long-term survival in patients with triple-negative breast cancer. J Clin Oncol 2008; 26: 1275-1281.
[0409] 2. Carey L A, Dees E C, Sawyer L, Gatti L, Moore D T, Collichio F et al. The triple negative paradox: primary tumor chemosensitivity of breast cancer subtypes. Clin Cancer Res 2007; 13: 2329-2334.
[0410] 3. von Minckwitz G, Untch M, Blohmer J U, Costa S D, Eidtmann H, Fasching P A et al. Definition and impact of pathologic complete response on prognosis after neoadjuvant chemotherapy in various intrinsic breast cancer subtypes. J Clin Oncol 2012; 30: 1796-1804.
[0411] 4. Sorlie T, Perou C M, Tibshirani R, Aas T, Geisler S, Johnsen H et al. Gene expression patterns of breast carcinomas distinguish tumor subclasses with clinical implications. Proceedings of the National Academy of Sciences of the United States of America 2001; 98: 10869-10874.
[0412] 5. Perou C M, Sorlie T, Eisen M B, van de Rijn M, Jeffrey S S, Rees C A et al. Molecular portraits of human breast tumours. Nature 2000; 406: 747-752.
[0413] 6. Weigelt B, Hu Z, He X, Livasy C, Carey L A, Ewend M G et al. Molecular portraits and 70-gene prognosis signature are preserved throughout the metastatic process of breast cancer. Cancer research 2005; 65: 9155-9158.
[0414] 7. Hu Z, Fan C, Oh D S, Marron J S, He X, Qaqish B F et al. The molecular portraits of breast tumors are conserved across microarray platforms. BMC genomics 2006; 7: 96-107.
[0415] 8. Parker J S, Mullins M, Cheang M C, Leung S, Voduc D, Vickery T et al. Supervised risk predictor of breast cancer based on intrinsic subtypes. J Clin Oncol 2009; 27: 1160-1167.
[0416] 9. van't Veer L J, Dai H, van de Vijver M J, He Y D, Hart A A, Mao M et al. Gene expression profiling predicts clinical outcome of breast cancer. Nature 2002; 415: 530-536.
[0417] 10. Paik S, Shak S, Tang G, Kim C, Baker J, Cronin M et al. A multigene assay to predict recurrence of tamoxifen-treated, node-negative breast cancer. The New England journal of medicine 2004; 351: 2817-2826.
[0418] 11. Buyse M, Loi S, van't Veer L, Viale G, Delorenzi M, Glas A M et al. Validation and clinical utility of a 70-gene prognostic signature for women with node-negative breast cancer. Journal of the National Cancer Institute 2006; 98: 1183-1192.
[0419] 12. Loi S, Haibe-Kains B, Desmedt C, Lallemand F, Tutt A M, Gillet C et al. Definition of clinically distinct molecular subtypes in estrogen receptor-positive breast carcinomas through genomic grade. J Clin Oncol 2007; 25: 1239-1246.
[0420] 13. Ma X J, Salunga R, Dahiya S, Wang W, Carney E, Durbecq V et al. A five-gene molecular grade index and HOXB13 IL17BR are complementary prognostic factors in early stage breast cancer. Clin Cancer Res 2008; 14: 2601-2608.
[0421] 14. Ma X J, Wang Z, Ryan P D, Isakoff S J, Barmettler A, Fuller A et al. A two-gene expression ratio predicts clinical outcome in breast cancer patients treated with tamoxifen. Cancer cell 2004; 5: 607-616.
[0422] 15. Sotiriou C, Wirapati P, Loi S, Harris A, Fox S, Smeds J et al. Gene expression profiling in breast cancer: understanding the molecular basis of histologic grade to improve prognosis. Journal of the National Cancer Institute 2006; 98: 262-272.
[0423] 16. Cheng W Y, Ou Yang T H, Anastassiou D. Biomolecular events in cancer revealed by attractor metagenes. PLoS Comput Biol 2013; 9: e1002920.
[0424] 17. Cheng W Y, Ou Yang T H, Anastassiou D. Development of a prognostic model for breast cancer survival in an open challenge environment. Sci Transl Med 2013; 5: 181ra150.
[0425] 18. Dai H, van't Veer L, Lamb J, He Y D, Mao M, Fine B M et al. A cell proliferation signature is a marker of extremely poor outcome in a subpopulation of breast cancer patients. Cancer research 2005; 65: 4059-4066.
[0426] 19. Rhodes D R, Yu J, Shanker K, Deshpande N, Varambally R, Ghosh D et al. ONCOMINE: a cancer microarray database and integrated data-mining platform. Neoplasia (New York, N.Y. 2004; 6: 1-6.
[0427] 20. Carter S L, Eklund A C, Kohane I S, Harris L N, Szallasi Z. A signature of chromosomal instability inferred from gene expression profiles predicts clinical outcome in multiple human cancers. Nature genetics 2006; 38: 1043-1048.
[0428] 21. Curtis C, Shah S P, Chin S F, Turashvili G, Rueda O M, Dunning M J et al. The genomic and transcriptomic architecture of 2,000 breast tumours reveals novel subgroups. Nature 2012; 486: 346-352.
[0429] 22. Haibe-Kains B, Desmedt C, Rothe F, Piccart M, Sotiriou C, Bontempi G. A fuzzy gene expression-based computational approach improves breast cancer prognostication. Genome Biol 2010; 11: R18.
[0430] 23. Szasz A M, Li Q, Eklund A C, Sztupinszki Z, Rowan A, Tokes A M et al. The CIN4 chromosomal instability qPCR classifier defines tumor aneuploidy and stratifies outcome in grade 2 breast cancer. PLoS ONE 2013; 8: e56707.
[0431] 24. Gyorffy B, Lanczky A, Eklund A C, Denkert C, Budczies J, Li Q et al. An online survival analysis tool to rapidly assess the effect of 22,277 genes on breast cancer prognosis using microarray data of 1,809 patients. Breast cancer research and treatment 2010; 123: 725-731.
[0432] 25. Rizzolio F, Tuccinardi T, Caligiuri I, Lucchetti C, Giordano A. CDK inhibitors: from the bench to clinical trials. Curr Drug Targets 2010; 11: 279-290.
[0433] 26. Horiuchi D, Kusdra L, Huskey N E, Chandriani S, Lenburg M E, Gonzalez-Angulo A M et al. MYC pathway activation in triple-negative breast cancer is synthetic lethal with CDK inhibition. The Journal of experimental medicine 2012; 209: 679-696.
[0434] 27. Manchado E, Guillamot M, Malumbres M. Killing cells by targeting mitosis. Cell death and differentiation 2012.
[0435] 28. Janssen A, Medema R H. Mitosis as an anti-cancer target. Oncogene 2011; 30: 2799-2809.
[0436] 29. Stucke V M, Sillje H H, Arnaud L, Nigg E A. Human Mps1 kinase is required for the spindle assembly checkpoint but not for centrosome duplication. The EMBO journal 2002; 21: 1723-1732.
[0437] 30. Nagalla S, Chou J W, Willingham M C, Ruiz J, Vaughn J P, Dubey P et al. Interactions between immunity, proliferation and molecular subtype in breast cancer prognosis. Genome Biol 2013; 14: R34.
[0438] 31. Bakhoum S F, Compton D A. Chromosomal instability and cancer: a complex relationship with therapeutic potential. The Journal of clinical investigation 2012; 122: 1138-1143.
[0439] 32. Roylance R, Endesfelder D, Gorman P, Burrell R A, Sander J, Tomlinson I et al. Relationship of extreme chromosomal instability with long-term survival in a retrospective analysis of primary breast cancer. Cancer Epidemiol Biomarkers Prev 2011; 20: 2183-2194.
[0440] 33. Birkbak N J, Eklund A C, Li Q, McClelland S E, Endesfelder D, Tan P et al. Paradoxical relationship between chromosomal instability and survival outcome in cancer. Cancer research 2011; 71: 3447-3452.
[0441] 34. Janssen A, van der Burg M, Szuhai K, Kops G J, Medema R H. Chromosome segregation errors as a cause of DNA damage and structural chromosome aberrations. Science (New York, N.Y. 2011; 333: 1895-1898.
[0442] 35. Kolodner R D, Cleveland D W, Putnam C D. Cancer. Aneuploidy drives a mutator phenotype in cancer. Science (New York, N.Y. 2011; 333: 942-943.
[0443] 36. Luo J, Solimini N L, Elledge S J. Principles of cancer therapy: oncogene and non-oncogene addiction. Cell 2009; 136: 823-837.
[0444] 37. Hanahan D, Weinberg R A. Hallmarks of cancer: the next generation. Cell 2011; 144: 646-674.
[0445] 38. Al-Ejeh F, Smart C E, Morrison B J, Chenevix-Trench G, Lopez J A, Lakhani S R et al. Breast cancer stem cells: treatment resistance and therapeutic opportunities. Carcinogenesis 2011; 32: 650-658.
[0446] 39. Kusumbe A P, Bapat S A. Cancer stem cells and aneuploid populations within developing tumors are the major determinants of tumor dormancy. Cancer research 2009; 69: 9245-9253.
[0447] 40. Liang Y, Zhong Z, Huang Y, Deng W, Cao J, Tsao G et al. Stem-like cancer cells are inducible by increasing genomic instability in cancer cells. The Journal of biological chemistry 2010; 285: 4931-4940.
[0448] 41. Do T V, Xiao F, Bickel L E, Klein-Szanto A J, Pathak H B, Hua X et al. Aurora kinase A mediates epithelial ovarian cancer cell migration and adhesion. Oncogene 2014; 33: 539-549.
[0449] 42. Joshi K, Banasavadi-Siddegowda Y, Mo X, Kim S H, Mao P, Kig C et al. MELK-dependent FOXM1 phosphorylation is essential for proliferation of glioma stem cells. Stem cells (Dayton, Ohio) 2013; 31: 1051-1063.
[0450] 43. Gu C, Banasavadi-Siddegowda Y K, Joshi K, Nakamura Y, Kurt H, Gupta S et al. Tumor-specific activation of the C-JUN/MELK pathway regulates glioma stem cell growth in a p53-dependent manner. Stem cells (Dayton, Ohio) 2013; 31: 870-881.
[0451] 44. Hebbard L W, Maurer J, Miller A, Lesperance J, Hassell J, Oshima R G et al. Maternal embryonic leucine zipper kinase is upregulated and required in mammary tumor-initiating cells in vivo. Cancer research 2010; 70: 8863-8873.
[0452] 45. Schvartzman J M, Duijf P H, Sotillo R, Coker C, Benezra R. Mad2 is a critical mediator of the chromosome instability observed upon Rb and p53 pathway inhibition. Cancer cell 2011; 19: 701-714.
[0453] 46. Chan C H, Morrow J K, Li C F, Gao Y, Jin G, Moten A et al. Pharmacological inactivation of Skp2 SCF ubiquitin ligase restricts cancer stem cell traits and cancer progression. Cell 2013; 154: 556-568.
[0454] 47. Daniel J, Coulter J, Woo J H, Wilsbach K, Gabrielson E. High levels of the Mps1 checkpoint protein are protective of aneuploidy in breast cancer cells. Proceedings of the National Academy of Sciences of the United States of America 2011; 108: 5384-5389.
[0455] 48. Maire V, Baldeyron C, Richardson M, Tesson B, Vincent-Salomon A, Gravier E et al. TTK/hMPS1 is an attractive therapeutic target for triple-negative breast cancer. PLoS ONE 2013; 8: e63712.
[0456] 49. Bild A H, Yao G, Chang J T, Wang Q, Potti A, Chasse D et al. Oncogenic pathway signatures in human cancers as a guide to targeted therapies. Nature 2006; 439: 353-357.
[0457] 50. Bittner M. Expression Project for Oncology—Breast Samples. International Genomics Consortium, Phoeniz, Ariz. 85004 Oncomine. Not Published 2005/01/15
[0458] 51. Bonnefoi H, Potti A, Delorenzi M, Mauriac L, Campone M, Tubiana-Hulin M et al. Validation of gene signatures that predict the response of breast cancer to neoadjuvant chemotherapy: a substudy of the EORTC 10994/BIG 00-01 clinical trial. The lancet oncology 2007; 8: 1071-1078.
[0459] 52. Gluck S, Ross J S, Royce M, McKenna E F, Jr., Perou C M, Avisar E et al. TP53 genomics predict higher clinical and pathologic tumor response in operable early-stage breast cancer treated with docetaxel-capecitabine+/−trastuzumab. Breast cancer research and treatment 2012; 132: 781-791.
[0460] 53. Hatzis C, Pusztai L, Valero V, Booser D J, Esserman L, Lluch A et al. A genomic predictor of response and survival following taxane-anthracycline chemotherapy for invasive breast cancer. JAMA 2011; 305: 1873-1881.
[0461] 54. Kao K J, Chang K M, Hsu H C, Huang A T. Correlation of microarray-based breast cancer molecular subtypes and clinical outcomes: implications for treatment optimization. BMC cancer 2011; 11: 143.
[0462] 55. Tabchy A, Valero V, Vidaurre T, Lluch A, Gomez H, Martin M et al. Evaluation of a 30-gene paclitaxel, fluorouracil, doxorubicin, and cyclophosphamide chemotherapy response predictor in a multicenter randomized trial in breast cancer. Clin Cancer Res 2010; 16: 5351-5361.
[0463] 56. TCGA. Comprehensive molecular portraits of human breast tumours. Nature 2012; 490: 61-70.
[0464] 57. Bos P D, Zhang X H, Nadal C, Shu W, Gomis R R, Nguyen D X et al. Genes that mediate breast cancer metastasis to the brain. Nature 2009; 459: 1005-1009.
[0465] 58. Desmedt C, Piette F, Loi S, Wang Y, Lallemand F, Haibe-Kains B et al. Strong time dependence of the 76-gene prognostic signature for node-negative breast cancer patients in the TRANSBIG multicenter independent validation series. Clin Cancer Res 2007; 13: 3207-3214.
[0466] 59. Schmidt M, Bohm D, von Tome C, Steiner E, Puhl A, Pilch H et al. The humoral immune system has a key prognostic impact in node-negative breast cancer. Cancer research 2008; 68: 5405-5413.
[0467] 60. Symmans W F, Hatzis C, Sotiriou C, Andre F, Peintinger F, Regitnig P et al. Genomic index of sensitivity to endocrine therapy for breast cancer. J Clin Oncol 2010; 28: 4111-4119.
[0468] 61. van de Vijver M J, He YD, van't Veer L J, Dai H, Hart A A, Voskuil D W et al. A gene-expression signature as a predictor of survival in breast cancer. The New England journal of medicine 2002; 347: 1999-2009.
[0469] 62. Pawitan Y, Bjohle J, Amler L, Borg A L, Egyhazi S, Hall P et al. Gene expression profiling spares early breast cancer patients from adjuvant therapy: derived and validated in two population-based cohorts. Breast Cancer Res 2005; 7: R953-964.
[0470] 63. Sorlie T, Tibshirani R, Parker J, Hastie T, Marron J S, Nobel A et al. Repeated observation of breast tumor subtypes in independent gene expression data sets. Proceedings of the National Academy of Sciences of the United States of America 2003; 100: 8418-8423.
[0471] 64. Zhao Y, Simon R. BRB-ArrayTools Data Archive for human cancer gene expression: a unique and efficient data sharing resource. Cancer Inform 2008; 6: 9-15.
[0472] 65. Miller L D, Smeds J, George J, Vega V B, Vergara L, Ploner A et al. An expression signature for p53 status in human breast cancer predicts mutation status, transcriptional effects, and patient survival. Proceedings of the National Academy of Sciences of the United States of America 2005; 102: 13550-13555.
[0473] 66. Wang Y, Klijn J G, Zhang Y, Sieuwerts A M, Look M P, Yang F et al. Gene-expression profiles to predict distant metastasis of lymph-node-negative primary breast cancer. Lancet 2005; 365: 671-679.
[0474] 67. Al-Ejeh F, Shi W, Miranda M, Simpson P T, Vargas A C, Song S et al. Treatment of triple-negative breast cancer using anti-EGFR-directed radioimmunotherapy combined with radiosensitizing chemotherapy and PARP inhibitor. J Nucl Med 2013; 54: 913-921.
[0475] 67. Colombo R, Caldarelli M, Mennecozzi M, Giorgini M L, Sola F, Cappella P et al. Targeting the mitotic checkpoint for cancer therapy with NMS-P715, an inhibitor of MPS1 kinase. Cancer research 2010; 70: 10255-10264.
[0476] 68. Janssen A, Kops G J, Medema R H. Elevating the frequency of chromosome mis-segregation as a strategy to kill tumor cells. Proceedings of the National Academy of Sciences of the United States of America 2009; 106: 19108-19113.
[0477] 69. Janssen A, Medema R H. Mitosis as an anti-cancer target. Oncogene 2011; 30: 2799-2809.
[0478] 70. Janssen A, van der Burg M, Szuhai K, Kops G J, Medema R H. Chromosome segregation errors as a cause of DNA damage and structural chromosome aberrations. Science (New York, N.Y. 2011; 333: 1895-1898.
[0479] 71. Degenhardt Y, Lampkin T. Targeting Polo-like kinase in cancer therapy. Clin Cancer Res 2010; 16: 384-389.
[0480] 72. Strebhardt K, Ullrich A. Targeting polo-like kinase 1 for cancer therapy.

[0481] Nature reviews 2006; 6: 321-330.
[0482] 73. Malumbres M, Barbacid M. Cell cycle kinases in cancer. Curr Opin Genet Dev 2007; 17: 60-65.
[0483] 74. Manchado E, Guillamot M, Malumbres M. Killing cells by targeting mitosis. Cell death and differentiation 2012.
[0484] 75. Manchado E, Malumbres M. Targeting aneuploidy for cancer therapy. Cell 2011; 144: 465-466.
[0485] 76. Colombo R, Moll J. Destabilizing aneuploidy by targeting cell cycle and mitotic checkpoint proteins in cancer cells. Curr Drug Targets 2010; 11: 1325-1335.

TABLE 1
Univariate and multivariate survival analysis of the aggressiveness score in the METABRIC dataset

| | Univariate Cox-proportional hazards | | Multivariate Cox-proportional hazards | |
|---|---|---|---|---|
| | model | | model (stepwise) | |
| | HR (95% CI) | p-value | HR (95% CI) | p-value |
| 206 genes score | 1.6173 (1.4174-1.8454) | <0.0001 | 1.5188 (1.3227-1.7440) | <0.0001 |
| (high, low) | | | | |
| 8 genes score | 1.5853 (1.2883-1.8103) | <0.0001 | 1.4760 (1.2198-1.6344) | 0.0001 |
| (high, low) | | | | |
| Lymph node | 1.8594 (1.6289-2.1224) | <0.0001 | 1.6807 (1.4610-1.9334) | <0.0001 |
| (+, −) | | | | |
| Tumor size | 1.4354 (1.2813-1.6080) | <0.0001 | 1.3666 (1.1642-1.6041) | <0.0001 |
| (T1, T2, T3) | | | | |
| HER2 status | 1.4565 (1.2537-1.6920) | <0.0001 | 1.1983 (1.0183-1.4101) | 0.0302 |
| (+, −) | | | | |
| Tumor grade | 1.3500 (1.2095-1.5067) | <0.0001 | ns | ns |
| (T1, T2, T3) | | | | |
| Ki67 | 1.4184 (1.2399-1.6226) | <0.0001 | ns | ns |
| (+, −) | | | | |
| MammaPrint | 1.3320 (1.1669-1.5204) | <0.0001 | ns | ns |
| (high, low) | | | | |
| CIN4 | 1.5310 (1.3413-1.7476) | <0.0001 | ns | ns |
| (high, low) | | | | |
| CIN75 | 1.5004 (1.3132-1.7143) | <0.0001 | ns | ns |
| (high, low) | | | | |
| Cell Cycle | 1.5018 (1.3145-1.7158) | <0.0001 | ns | ns |
| (high, low) | | | | |
| ER status | 1.3016 (1.1167-1.5170) | 0.0008 | ns | ns |
| (+, −) | | | | |
| OncotypeDx | 1.2672 (1.0909-1.4720) | 0.0021 | ns | ns |
| (L, I, H) | | | | |
| Treatment | 1.1646 (0.9753-1.2639) | 0.0939 | ns | ns |
| (yes, no) | | | | |
| Age | 1.1235 (0.8480-1.4886) | 0.4196 | ns | ns |
| (<40, >40) | | | | |

HR: Hazard Ratio.
CI: confidence interval.
ns: not significant.
OncoTypeDx scores are low (L, <18), intermediate (I, 18-31), high (H > 31).
All variables were included in the multivariate Cox-proportional hazards model analysis and by stepwise model, only significant co-variants were included in the final analysis shown in Table.

TABLE 2
Correlation of TTK mRNA level and clinico-pathological
indicators in the METABRIC dataset

| Comparison | TTK Low | TTK high | X² |
|---|---|---|---|
| Tumor size | | | |
| <2 cm | 346 (18%) | 280 (14%) | p < 1.0E−6 |
| >2 cm <5 cm | 509 (26%) | 685 (35%) | p = 3.2E−5 |
| >5 cm | 60 (3%) | 92 (5%) | p = 1.25E−2 |
| Tumor Grade | | | |
| Grade 1 | 137 (7%) | 33 (2%) | p < 1.0E−6 |
| Grade 2 | 479 (25%) | 296 (16%) | p < 1.0E−6 |
| Grade 3 | 251 (13%) | 706 (37%) | p < 1.0E−6 |
| Ki67 expression | | | |
| Low | 826 (39%) | 242 (11%) | |
| High | 237 (11%) | 831 (39%) | p < 1.0E−6 |
| Immunohistochemical subtypes | | | |
| ER negative | 71 (4%) | 369 (19%) | p < 1.0E−6 |
| ER positive | 827 (42%) | 681 (35%) | |
| PR negative | 306 (15%) | 637 (32%) | p < 1.0E−6 |
| PR positive | 617 (31%) | 432 (22%) | |
| HER2 negative | 802 (40%) | 744 (37%) | |
| HER2 positive | 118 (6%) | 323 (16%) | p < 1.0E−6 |
| non-TNBC | 885 (45%) | 840 (43%) | |
| Triple negative (TNBC) | 29 (1%) | 221 (11%) | p < 1.0E−6 |
| Intrinsic subtypes | | | |
| Luminal A | 552 (28%) | 169 (9%) | p < 1.0E−6 |
| Luminal B | 142 (7%) | 350 (18%) | p < 1.0E−6 |
| HER2-enriched | 40 (2%) | 200 (10%) | p < 1.0E−6 |
| Normal-like | 161 (8%) | 41 (2%) | p < 1.0E−6 |
| Basal-like | 26 (1%) | 305 (15%) | p < 1.0E−6 |
| Age (years) | | | |
| <50 | 167 (8%) | 259 (13%) | p = 8.68E−4 |
| 50-74 | 485 (24%) | 549 (27%) | ns |
| 75-100 | 282 (14%) | 253 (13%) | ns |
| TP53 mutation | | | |
| Wildtype | 390 (48%) | 331 (40%) | |
| Mutant | 14 (2%) | 85 (10%) | p < 1.0E−6 |

X²: Chi square test performed using GraphPad ® Prism.
ns not significant

TABLE 3
Associations between TTK protein expression and clinico-pathological indicators

| Parameter | TTK (0-1) | TTK (2) | TTK (3) | P value^{#} |
|---|---|---|---|---|
| Histological type | | | | |
| Ductal NOS | 147 (60.7%) | 67 (27.7%) | 28 (11.6%) | 0.0265 |
| Lobular | 43 (76.8%) | 10 (17.9%) | 3 (5.4%) | |
| Mixed ducto-lobular | 31 (88.6%) | 4 (11.4%) | 0 (0.0%) | |
| Metaplastic | 9 (56.3%) | 7 (43.8%) | 0 (0.0%) | |
| Tubular/cribifonn | 8 (80.0%) | 2 (20.0%) | 0 (0.0%) | |
| Other special types (incl mixed) | 37 (66.1%) | 14 (25.0%) | 5 (8.9%) | |
| Overall grade | | | | |
| 1 | 43 (76.8%) | 13 (23.2%) | 0 (0.0%) | <0.0001 |
| 2 | 162 (77.5%) | 41 (19.6%) | 6 (2.9%) | |
| 3 | 73 (47.7%) | 50 (32.7%) | 30 (19.6%) | |
| Mitotic score | | | | |
| 1 | 193 (79.8%) | 44 (18.2%) | 5 (2.1%) | <0.0001 |
| 2 | 33 (61.1%) | 18 (33.3%) | 3 (5.6%) | |
| 3 | 52 (43.0%) | 42 (34.7%) | 27 (22.3%) | |
| Nuclear pleomorphism score | | | | |
| 1-2 | 164 (75.2%) | 49 (22.5%) | 5 (2.3%) | <0.0001 |
| 3 | 115 (57.2%) | 55 (27.4%) | 31 (15.4%) | |
| Tubule score | | | | |
| 1 | 10 (76.9%) | 3 (23.1%) | 0 (0.0%) | ns |
| 2 | 52 (69.3%) | 20 (26.7%) | 3 (4.0%) | |
| 3 | 216 (65.5%) | 81 (24.5%) | 33 (10.0%) | |
| Lymph node status | | | | |
| Positive | 77 (62.1%) | 41 (33.1%) | 6 (4.8%) | 0.0056 |
| Negative | 81 (73.0%) | 18 (16.2%) | 12 (10.8%) | |
| Tumor size | | | | |
| <2 cm | 112 (68.3%) | 40 (24.4%) | 12 (7.3%) | ns |
| 2-5 cm | 104 (66.2%) | 38 (24.20) | 15 (9.60) | |
| >5 cm | 19 (61.3%) | 6 (19.40) | 6 (19.40) | |
| Lymphovascular invasion | | | | |
| Absent | 214 (67.3%) | 77 (24.2%) | 27 (8.5%) | ns |
| Present | 63 (63.6%) | 27 (27.3%) | 9 (9.1%) | |
| Lymphocytic infiltrate | | | | |
| Absent | 119 (78.3%) | 28 (18.40o) | 5 (3.3%) | 0.0007 |
| Mild | 115 (63.9%) | 47 (26.1%) | 18 (10.0%) | |
| Moderate | 36 (53.7%) | 23 (34.3%) | 8 (11.9%) | |
| Severe | 7 (41.2%) | 6 (35.3%) | 4 (23.5%) | |
| Central scarring/fibrosis | | | | |
| Absent | 254 (67.7%) | 90 (24.00) | 31 (8.3%) | ns |
| Present | 25 (56.8%) | 14 (31.80) | 5 (11.40) | |
| Tumor border | | | | |
| Infiltrative | 250 (69.1%) | 88 (24.3%) | 24 (6.6%) | 0.0003 |
| Pushing (<50%) | 11 (36.7%) | 11 (36.7%) | 8 (26.7%) | |
| Pushing (>50%) | 16 (64.0%) | 5 (20.0%) | 4 (16.0%) | |
| Ki67 expression (20% threshold) | | | | |
| Low | 240 (71.6%) | 77 (23.0%) | 18 (5.4%) | <0.0001 |
| High | 14 (25.9%) | 23 (42.6%) | 17 (31.5%) | |
| Prognostic subgroups | | | | |
| HER2+ | 21 (51.2%) | 14 (34.1%) | 6 (14.6%) | <0.0001 |
| HR+/HER2-neg (Ki67-high) | 6 (24.0%) | 13 (52.0%) | 6 (24.0%) | |
| HR+/HER2-neg (Ki67-low) | 196 (76.0%) | 53 (20.5%) | 9 (3.5%) | |
| TN (basal-like) | 23 (41.80) | 20 (36.4%) | 12 (21.8%) | |
| TN (non-basal) | 10 (71.40) | 1 (7.10) | 3 (21.40) | |

TMAs were scored by two independent assessors according to the following categories: 0, negative; 1, weak and focal staining (pooled with negative cases for this analysis); 2, moderate-strong focal staining (collectively <50%) of tumour cells); 3 = moderate-strong diffuse staining (>50% of tumour cells). Regarding % cells stained, we disregarded mitotic cells to assess mitosis-independent TTK expression.
^{#}Chi square test (GraphPad ® Prism. ns: not significant)

TABLE 4
The aggressiveness genelist (206 genes)

| Input | Approved Name | HGNC ID | Location |
|---|---|---|---|
| ADIRF | adipogenesis regulatory factor | HGNC: 24043 | 10q23.31 |
| AFF3 | AF4/FMR2 family, member 3 | HGNC: 6473 | 2q11.2-q12 |
| AGO2 | argonaute RISC catalytic component 2 | HGNC: 3263 | 8q24.3 |
| AGR3 | anterior gradient 3 homolog (Xenopus laevis) | HGNC: 24167 | 7p21.1 |
| AHNAK | AHNAK nucleoprotein | HGNC: 347 | 11q12-q13 |
| ALDH3A2 | aldehyde dehydrogenase 3 family, member | HGNC: 403 | 17p11.2 |
| | A2 | | |
| ANLN | anillian, actin binding protein | HGNC: 14082 | 7p15-p14 |
| APOBEC3B | apolipoprotein B mRNA editing enzyme, | HGNC: 17352 | 22q13.1-q13.2 |
| | catalytic polypeptide-like 3B | | |
| AQP9 | aquaporin 9 | HGNC: 643 | 15q |
| ATP6V1C2 | ATPase, H+ transporting, lysosomal 42 kDa, | HGNC: 18264 | 2p25.1 |
| | V1 subunit C2 | | |
| AUNIP | aurora kinase A and ninein interacting | HGNC: 28363 | 1p36.11 |
| | protein | | |
| AURKA | aurora kinase A | HGNC: 11393 | 20q13 |
| AURKB | aurora kinase B | HGNC: 11390 | 17p13.1 |
| AZGP1 | alpha-2-glycoprotein 1, zinc-binding | HGNC: 910 | 7q22.1 |
| BBS1 | Bardet-Biedl syndrome 1 | HGNC: 966 | 11q13 |
| BCL2 | B-cell CLL/lymphoma 2 | HGNC: 990 | 18q21.3 |
| BIRC5 | baculoviral IAP repeat containing 5 | HGNC: 593 | 17q25.3 |
| BLM | Bloom syndrome, RecQ helicase-like | HGNC: 1058 | 15q26.1 |
| BTG2 | BTG family, member 2 | HGNC: 1131 | 1q32 |
| BUB1 | BUB1 mitotic checkpoint serine/threonine | HGNC: 1148 | 2q13 |
| | kinase | | |
| BYSL | bystin-like | HGNC: 1157 | 6p21.1 |
| C10orf32 | chromosome 10 open reading frame 32 | HGNC: 23516 | 10q24.33 |
| C18orf56 | chromosome 18 open reading frame 56 | HGNC: 29553 | 18p11.32 |
| C1orf106 | chromosome 1 open reading frame 106 | HGNC: 25599 | 1q32.1 |
| C1orf21 | chromosome 1 open reading frame 21 | HGNC: 15494 | 1q25 |
| C7orf63 | chromosome 7 open reading frame 63 | HGNC: 26107 | 7q21.13 |
| CA9 | carbonic anhydrase IX | HGNC: 1383 | 9p13.3 |
| CARD10 | caspase recruitment domain family, member | HGNC: 16422 | 22q13.1 |
| | 10 | | |
| CASC1 | cancer susceptibility candidate 1 | HGNC: 29599 | 12p12.1 |
| CCDC170 | coiled-coil domain containing 170 | HGNC: 21177 | 6q25.1 |
| CCDC176 | coiled-coil domain containing 176 | HGNC: 19855 | 14q24.3 |
| CCNA2 | cyclin A2 | HGNC: 1578 | 4q27 |
| CCNB2 | cyclin B2 | HGNC: 1580 | 15q21.3 |
| CCNE1 | cyclin E1 | HGNC: 1589 | 19q12 |
| CCNG2 | cyclin G2 | HGNC: 1593 | 4q21.22 |
| CD163 | CD163 molecule | HGNC: 1631 | 12p13 |
| CDC20 | cell division cycle 20 | HGNC: 1723 | 1p34.1 |
| CDC25A | cell division cycle 25A | HGNC: 1725 | 3p21 |
| CDC25B | cell division cycle 25B | HGNC: 1726 | 20p13 |
| CDC45 | cell division cycle 45 | HGNC: 1739 | 22q11.21 |
| CDCA3 | cell division cycle associated 3 | HGNC: 14624 | 12p13.31 |
| CDCA5 | cell division cycle associated 5 | HGNC: 14626 | 11q13.1 |
| CDCA7 | cell division cycle associated 7 | HGNC: 14628 | 2q31.1 |
| CDCA8 | cell division cycle associated 8 | HGNC: 14629 | 1p34.3 |
| CDK1 | cyclin-dependent kinase 1 | HGNC: 1722 | 10q21.2 |
| CDKN2A | cyclin-dependent kinase inhibitor 2A | HGNC: 1787 | 9p21 |
| CENPA | centromere protein A | HGNC: 1851 | 2p23.3 |
| CENPE | centromere protein E, 312 kDa | HGNC: 1856 | 4q24-q25 |
| CENPN | centromere protein N | HGNC: 30873 | 16q23.2 |
| CENPW | centromere protein W | HGNC: 21488 | 6q22.32 |
| CEP55 | centrosomal protein 55 kDa | HGNC: 1161 | 10q24.1 |
| CHEK1 | checkpoint kinase 1 | HGNC: 1925 | 11q24.2 |
| CIRBP | cold inducible RNA binding protein | HGNC: 1982 | 19p13.3 |
| CKAP2L | cytoskeleton associated protein 2-like | HGNC: 26877 | 2q13 |
| CKS1B | CDC28 protein kinase regulatory subunit 1B | HGNC: 19083 | 1q21.2 |
| CKS2 | CDC28 protein kinase regulatory subunit 2 | HGNC: 2000 | 9q22 |
| CLIC6 | chloride intracellular channel 6 | HGNC: 2065 | 21q22.12 |
| CMC2 | COX assembly mitochondrial protein 2 | HGNC: 24447 | 16q23.2 |
| | homolog (S. cerevisiae) | | |
| CMYA5 | cardiomyopathy associated 5 | HGNC: 14305 | 5q14.1 |
| CPEB2 | cytoplasmic polyadenylation element binding | HGNC: 21745 | 4p15.33 |
| | protein 2 | | |
| CST3 | cystatin C | HGNC: 2475 | 20p11.2 |
| CSTB | cystatin B (stefin B) | HGNC: 2482 | 21q22.3 |
| CTSV | cathepsin V | HGNC: 2538 | 9q22.33 |
| CYB5D1 | cytochrome b5 domain containing 1 | HGNC: 26516 | 17p13.1 |
| CYBRD1 | cytochrome b reductase 1 | HGNC: 20797 | 2q31 |
| DACH1 | dachshund homolog 1 (Drosophila) | HGNC: 2663 | 13q22 |
| DAPK1 | death-associated protein kinase 1 | HGNC: 2674 | 9q34.1 |
| DEPDC1 | DEP domain containing 1 | HGNC: 22949 | 1p31.2 |
| DKC1 | dyskeratosis congenita 1, dyskerin | HGNC: 2890 | Xq28 |
| DLGAP5 | discs, large (Drosophila) homolog-associated | HGNC: 16864 | 14q22.3 |
| | protein 5 | | |
| DNAJC12 | DnaJ (Hsp40) homolog, subfamily C, | HGNC: 28908 | 10q21.3 |
| | member 12 | | |
| DNALI1 | dynein, axonemal, light intermediate chain 1 | HGNC: 14353 | 1p35.1 |
| EC12 | enoyl-CoA delta isomerase 2 | HGNC: 14601 | 6p24.3 |
| ELOVL5 | ELOVL fatty acid elongase 5 | HGNC: 21308 | 6p21.1-p12.1 |
| ESR1 | estrogen receptor 1 | HGNC: 3467 | 6q24-q27 |
| EXO1 | exonuclease 1 | HGNC: 3511 | 1q42-q43 |
| FAM198B | family with sequence similarity 198, member | HGNC: 25312 | 4q32.1 |
| | B | | |
| FAM214A | family with sequence similarity 214, member | HGNC: 25609 | 15q21.2-q21.3 |
| | A | | |
| FAM64A | family with sequence similarity 64, member | HGNC: 25483 | 17p13.2 |
| | A | | |
| FAM83D | family with sequence similarity 83, member | HGNC: 16122 | 20 |
| | D | | |
| FOXA1 | forkhead box A1 | HGNC: 5021 | 14q12-q13 |
| FOXM1 | forkhead box M1 | HGNC: 3818 | 12p13 |
| FPR3 | formyl peptide receptor 3 | HGNC: 3828 | 19q13.3-q13.4 |
| GAPDH | glyceraldehyde-3-phosphate dehydrogenase | HGNC: 4141 | 12p13.31 |
| GFRA1 | GDNF family receptor alpha 1 | HGNC: 4243 | 10q25-q26 |
| GGH | gamma-glutamyl hydrolase (conjugase, | HGNC: 4248 | 8q12.3 |
| | folylpoly gammaglutamyl hydrolase) | | |
| GLI3 | GLI family zinc finger 3 | HGNC: 4319 | 7p13 |
| GLYATL2 | glycine-N-acyltransferase-like 2 | HGNC: 24178 | 11q12.1 |
| GPD1L | glycerol-3-phosphate dehydrogenase 1-like | HGNC: 28956 | 3p22.3 |
| GPSM2 | G-protein signaling modulator 2 | HGNC: 29501 | 1p13.3 |
| GSTM1 | glutathione S-transferase mu 1 | HGNC: 4632 | 1p13.3 |
| GSTM3 | glutathione S-transferase mu 3 (brain) | HGNC: 4635 | 1p13.3 |
| GTPBP4 | GTP binding protein 4 | HGNC: 21535 | 10p15-p14 |
| GTSE1 | G-2 and S-phase expressed 1 | HGNC: 13698 | 22q13.2-q13.3 |
| HJURP | Holliday junction recognition protein | HGNC: 25444 | 2q37.1 |
| HRASLS | HRAS-like suppressor | HGNC: 14922 | 3q29 |
| HSD17B4 | hydroxysteroid (17-beta) dehydrogenase 4 | HGNC: 5213 | 5q2 |
| HSD17B8 | hydroxysteroid (17-beta) dehydrogenase 8 | HGNC: 3554 | 6p21.3 |
| IGFBP2 | insulin-like growth factor binding protein 2, | HGNC: 5471 | 2q33-q34 |
| | 36 kDa | | |
| IGFBP4 | insulin-like growth factor binding protein 4 | HGNC: 5473 | 17q12-q21.1 |
| IL6ST | interleukin 6 signal transducer (gp130, | HGNC: 6021 | 5q11.2 |
| | oncostatin M receptor) | | |
| IL8 | interleukin 8 | HGNC: 6025 | 4q13-q21 |
| IMPA2 | inositol (myo)-1 (or 4)-monopliphatase 2 | HGNC: 6051 | 18p11.2 |
| IRAK1 | interleukin-1 receptor-associated kinase 1 | HGNC: 6112 | Xq28 |
| KCNG1 | potassium voltage-gated channel, subfamily | HGNC: 6248 | 20q13 |
| | G, member 1 | | |
| KCNMA1 | potassium large conductance calcium- | HGNC: 6284 | 10q22 |
| | activated channel, subfamily M, alpha | | |
| | member1 | | |
| KCTD3 | potassium channel tetramerization domain | HGNC: 21305 | 1q41 |
| | containing 3 | | |
| KIF13B | kinesin family member 13B | HGNC: 14405 | 8p21 |
| KIF14 | kinesin family member 14 | HGNC: 19181 | 1q32.1 |
| KIF20A | kinesin family member 20A | HGNC: 9787 | 5q31 |
| KIF23 | kinesin family member 23 | HGNC: 6392 | 15q23 |
| KIF2C | kinesin family member 2C | HGNC: 6393 | 1p34.1 |
| KIF5C | kinesin family member 5C | HGNC: 6325 | 2q23 |
| KRT6A | keratin 6A | HGNC: 6443 | 12q13.13 |
| LAD1 | ladinin 1 | HGNC: 6472 | 1q25.1-q32.3 |
| LAPTM4B | lysosomal protein transmembrane 4 beta | HGNC: 13646 | 8q22.1 |
| LFNG | LFNG O-fucosylpeptide 3-beta-N- | HGNC: 6560 | 7p22.3 |
| | acetylglucosaminyltransferase | | |
| LMNB2 | lamin B2 | HGNC: 6638 | 19p13.3 |
| LOC100286909 | — | — | — |
| LRIG1 | leucine-rich repeats and immunoglobulin- | HGNC: 17360 | 3p14 |
| | like domains 1 | | |
| LRP8 | low density lipoprotein receptor-related | HGNC: 6700 | 1p32.3 |
| | protein 8, apolipoprotein e receptor | | |
| LYPD6 | LY6/PLAUR domain containing 6 | HGNC: 28751 | 2q23.2 |
| MAD2L1 | MAD2 mitotic arrest deficient-like 1 (yeast) | HGNC: 6763 | 4q27 |
| MAPT | microtubule-associated protein tau | HGNC: 6893 | 17q21 |
| MCM10 | inthromosoine maintenance complex | HGNC: 18043 | 10p13 |
| | component 10 | | |
| MCM2 | minichromosome maintenance complex | HGNC: 6944 | 3q21 |
| | component 2 | | |
| MCM4 | minichromosome maintenance complex | HGNC: 6947 | 8q12-q13 |
| | component 4 | | |
| MCM6 | minichromosome maintenance complex | HGNC: 6949 | 2q14-q21 |
| | component 6 | | |
| MCM7 | minichromosome maintenance complex | HGNC: 6950 | 7q21.3-q22.1 |
| | component 7 | | |
| MEIS3P1 | Meis homeobox 3 pseudogene 1 | HGNC: 7002 | 17p12 |
| MELK | maternal embryonic leucine zipper kinase | HGNC: 16870 | 9p13.1 |
| MLPH | melanophilin | HGNC: 29643 | 2q37.2 |
| MST1 | macrophage stimulating 1 (hepatocyte | HGNC: 7380 | 3p21 |
| | growth factor-like) | | |
| MTHFD1L | methylenetetrahydrofolate dehydrogenase | HGNC: 21055 | 6q25.1 |
| | (NADP + dependent) 1-like | | |
| MX2 | myxovirus (influenza virus) resistance 2 | HGNC: 7533 | 21q22.3 |
| | (mouse) | | |
| MYB | v-myb avian myeloblastosis viral oncogene | HGNC: 7545 | 6q22-q23 |
| | homolog | | |
| NCAPG | non-SMC condensin-1 complex, subunit G | HGNC: 24304 | 4p15.32 |
| NDC80 | NDC80 kinetochore complex component | HGNC: 16909 | 18p11.31 |
| NFIA | nuclear factor I/A | HGNC: 7784 | 1p31.3-p31.2 |
| NME5 | NME/NM23 family member 5 | HGNC: 7853 | 5q31.2 |
| NOP2 | NOP2 nucleolar protein | HGNC: 7867 | 12p13 |
| NOSTRIN | nitric oxide synthase trafficker | HGNC: 20203 | 2q31.1 |
| NOVA1 | neuro-oncological ventral antigen 1 | HGNC: 7886 | 14q12 |
| NRIP1 | nuclear receptor interacting protein 1 | HGNC: 8001 | 21q11.2 |
| NUP205 | nucleoporin 205 kDa | HGNC: 18658 | 7q31.32 |
| NUP93 | nucleoporin 93 kDa | HGNC: 28958 | 16q13 |
| NUSAP1 | nucleoporin and spindle associated protein 1 | HGNC: 18538 | 15q14 |
| OGN | osteoglycin | HGNC: 8126 | 9q22 |
| PDCD4 | programmed cell death 4 (neoplastic | HGNC: 8763 | 10q24 |
| | transformation inhibitor) | | |
| PFKP | phosphofructokinase, platelet | HGNC: 8878 | 10p15.3-p15.2 |
| PHYHD1 | phytanoyl-CoA dioxygenase domain | HGNC: 23396 | 9q34.13 |
| | containing 1 | | |
| PIP | prolactin-induced protein | HGNC: 8993 | 7q32-qter |
| PLAT | plasminogen activator, tissue | HGNC: 9051 | 8p11.21 |
| PLCH1 | phospholipase C, eta 1 | HGNC: 29185 | 3q25 |
| PNP | purine nucleoside phosphorylase | HGNC: 7892 | 14q11.2 |
| PNPLA7 | patatin-like phospholipase domain containing | HGNC: 24768 | 9q34.3 |
| | 7 | | |
| PRC1 | protein regulator of cytokinesis 1 | HGNC: 9341 | 15q26.1 |
| PSMB2 | proteasome (prosome, macropain) subunit, | HGNC: 9539 | 1p34.2 |
| | beta type, 2 | | |
| PTGER3 | prostaglandin E receptor 3 (subtype EPS3) | HGNC: 9595 | 1p31.2 |
| PTPRT | protein tyrosine phosphatase, receptor type, | HGNC: 9682 | 20q12-q13 |
| | T | | |
| PTTG1 | pituitary tumor-transforming 1 | HGNC: 9690 | 5q35.1 |
| QDPR | quinoid dihydropteridine reductase | HGNC: 9752 | 4p15.31 |
| RAB27B | RAB27B, member RAS oncogene family | HGNC: 9767 | 18q21.2 |
| RABEP1 | rabaptin, RAB GTPase binding effector | HGNC: 17677 | 17p13.2 |
| | protein 1 | | |
| RAD51AP1 | RAD51 associated protein 1 | HGNC: 16956 | 12p13.2-p13.1 |
| RBM38 | RNA binding motif protein 38 | HGNC: 15818 | 20q13.31 |
| RERG | RAS-like, estrogen-regulated, growth | HGNC: 15980 | 12p13.1 |
| | inhibitor | | |
| RFC4 | replication factor C (activator 1) 4, 37 kDa | HGNC: 9972 | 3q27 |
| RIPK2 | receptor-interacting serine-threonine kinase 2 | HGNC: 10020 | 8q21 |
| RNASE4 | ribonuclease, RNase A family, 4 | HGNC: 10047 | 14q11 |
| RPP40 | ribonuclease P/MRP 40 kDa subunit | HGNC: 20992 | 6p25.1 |
| RPS23 | ribosomal protein S23 | HGNC: 10410 | 5q14.2 |
| S100A8 | S100 calcium binding protein A8 | HGNC: 10498 | 1q12-q22 |
| SCUBE2 | signal peptide, CUB domain, EGF-like 2 | HGNC: 30425 | 11p15.3 |
| SH3BGRL | SH3 domain binding glutamic acid-rich | HGNC: 10823 | Xq13.3 |
| | protein like | | |
| SKP1 | S-phase kinase-associated protein 1 | HGNC: 10899 | 5q31 |
| SKP2 | S-phase kinase-asseciated protein 2, E3 | HGNC: 10901 | 5p13 |
| | ubiquitin protein ligase | | |
| SLC16A10 | solute carrier family 16 (aromatic amino acid | HGNC: 17027 | 6q21-q22 |
| | transporter), member 10 | | |
| SLC2A1 | solute carrier family 2 (facilitated glucose | HGNC: 11005 | 1p34.2 |
| | transporter), member 1 | | |
| SLC39A6 | solute carrier family 39 (zinc transporter), | HGNC: 18607 | 18q12.2 |
| | member 6 | | |
| SLC40A1 | solute carrier family 40 (iron-regulated | HGNC: 10909 | 2q32 |
| | transporter), member 1 | | |
| SLC7A5 | solute carrier family 7 (amino acid | HGNC: 11063 | 16q24.3 |
| | transporter light chain, L system), member 5 | | |
| SOD2 | superoxide dismutase 2, mitochondrial | HGNC: 11180 | 6q25 |
| SOX11 | SRY (sex determining region Y)-box 11 | HGNC: 11191 | 2p25 |
| SRD5A1 | steroid-5-alpha-reductase, alpha polypeptide | HGNC: 11284 | 5p15.31 |
| | 1 (3-oxo-5 alpha-steroid delta 4- | | |
| | dehydrogenase alpha 1) | | |
| SRPK1 | SRSF protein kinase 1 | HGNC: 11305 | 6p21.31 |
| STC2 | stanniocalcin 2 | HGNC: 11374 | 5q35.2 |
| STIL | SCL/TAL1 interrupting locus | HGNC: 10879 | 1p32 |
| STK32B | serine/threonine kinase 32B | HGNC: 14217 | 4p16 |
| SYTL4 | synaptotagmin-like 4 | HGNC: 15588 | Xq21.33 |
| TAT | tyrosine aminotransferase | HGNC: 11573 | 16q22.1 |
| TBC1D9 | TBC1 domain family, member 9 (with | HGNC: 21710 | 4q31.1 |
| | GRAM domain) | | |
| TEAD4 | TEA domain family member 4 | HGNC: 11711 | 12p13.3-p13.2 |
| TFF1 | trefoil factor 1 | HGNC: 11755 | 21q22.3 |
| TFF3 | trefoil factor 3 (intestinal) | HGNC: 11757 | 21q22.3 |
| TMEM26 | transmembrane protein 26 | HGNC: 28550 | 10q21.3 |
| TPX2 | TPX2, microtubule-associated, homolog | HGNC: 1249 | 20q11.2 |
| | (Xenopus laevis) | | |
| TRIP13 | thyroid hormone receptor interactor 13 | HGNC: 12307 | 5p15 |
| TROAP | trophinin associated protein | HGNC: 12327 | 12q13.12 |
| TTK | TTK protein kinase | HGNC: 12401 | 6q13-q21 |
| TUBA4A | tubulin, alpha 4a | HGNC: 12407 | 2q36.1 |
| UBE2C | ubiquitin-conjugating enzyme E2C | HGNC: 15937 | 20q13.12 |
| USB1 | U6 snRNA biogenesis 1 | HGNC: 25792 | 16q13 |
| VGLL1 | vestigial like 1 (Drosophila) | HGNC: 20985 | Xq26.3 |
| XBP1 | X-box binding protein 1 | HGNC: 12801 | 22q12.1 |
| YEATS2 | YEATS domain containing 2 | HGNC: 25489 | 3q27.3 |

TABLE 6
Association of the 6 overexpressed genes in the 8-genes
score with RFS and DMFS at 5 and 10 years

| | | RFS | | | |
|---|---|---|---|---|---|
| | | 5 years | | 10 years | |
| Patient subgroup and cut-off | | HR (95% CI) | p-value | HR (95% CI) | p-value |
| All | Median | 2.52 (2.17-2.93) | <1.00E−16 | 2.16 (1.90-2.47) | <1.00E−16 |
| | Quartile | 3.03 (2.43-3.78) | <1.00E−16 | 2.46 (2.09-2.89) | <1.00E−16 |
| | Tertile | 2.83 (2.35-3.41) | <1.00E−16 | 2.70 (2.24-3.27) | <1.00E−16 |
| ER+ | Median | 2.67 (2.25-3.17) | <1.00E−16 | 2.28 (1.96-2.65) | <1.00E−16 |
| | Quartile | 2.90 (2.29-3.67) | <1.00E−16 | 2.64 (2.16-3.23) | <1.00E−16 |
| | Tertile | 2.87 (2.34-3.53) | <1.00E−16 | 2.51 (2.11-2.99) | <1.00E−16 |
| LN− | Median | 2.76 (2.19-3.48) | <1.00E−16 | 2.25 (1.84-2.74) | 2.20E−16 |
| | Quartile | 2.76 (2.00-3.80) | 1.10E−10 | 2.51 (1.91-3.29) | 5.10E−12 |
| | Tertile | 2.92 (2.21-3.87) | 4.30E−15 | 2.53 (2.00-3.19) | 1.00E−15 |
| LN+ | Median | 2.20 (1.57-3.08) | 2.40E−06 | 1.88 (1.40-2.52) | 1.90E−05 |
| | Quartile | 3.19 (1.87-5.44) | 6.60E−06 | 2.56 (1.67-3.94) | 8.10E−06 |
| | Tertile | 2.45 (1.61-3.37) | 1.70E−05 | 2.05 (1.45-2.91) | 4.00E−05 |
| | | DMFS | | | |
| | | 5 years | | 10 years | |
| Patient subgroup and cut-off | | HR (95% CI) | p-value | HR (95% CI) | p-value |
| All | Median | 2.87 (2.17-3.79) | 8.90E−15 | 2.37 (1.87-3.01) | 1.90E−13 |
| | Quartile | 3.64 (2.41-5.52) | 5.80E−11 | 3.43 (2.41-4.88) | 3.20E−12 |
| | Tertile | 3.53 (2.48-5.04) | 8.70E−14 | 2.92 (2.18-3.90) | 3.70E−14 |
| ER+ | Median | 3.43 (2.49-4.74) | 1.30E−15 | 2.63 (2.00-3.45) | 4.20E−13 |
| | Quartile | 3.41 (2.21-5.27) | 8.80E−09 | 3.27 (2.26-4.71) | 2.20E−11 |
| | Tertile | 3.87 (2.62-5.74) | 8.10E−13 | 3.07 (2.34-4.20) | 2.30E−13 |
| LN− | Median | 4.84 (2.53-9.26) | 1.40E−07 | 2.80 (2.00-3.93) | 4.20E−10 |
| | Quartile | 4.86 (2.82-9.37) | 2.70E−10 | 4.46 (2.61-7.60) | 1.80E−09 |
| | Tertile | 3.98 (2.61-6.07) | 4.20E−12 | 3.76 (2.46-5.74) | 4.50E−11 |
| LN+ | Median | 2.12 (1.19-3.80) | 9.40E−03 | 2.16 (1.28-3.62) | 3.00E−03 |
| | Quartile | 2.97 (1.18-7.44) | 1.50E−02 | 2.87 (1.31-6.29) | 6.00E−03 |
| | Tertile | 3.51 (1.50-8.21) | 2.00E−03 | 2.88 (1.47-5.68) | 1.40E−03 |

p-values are from Log rank test from KM-plotter

TABLE 7
Association of the 2 overexpressed genes in the 8-genes
score with RFS and DMFS at 5 and 10 years

| | | RFS | | | |
|---|---|---|---|---|---|
| | | 5 years | | 10 years | |
| Patient subgroup and cut-off | | HR (95% CI) | p-value | HR (95% CI) | p-value |
| All | Median | 0.53 (0.46-0.61) | <1.00E−16 | 0.59 (0.52-0.67) | 5.60E−16 |
| | Quartile | 0.53 (0.35-0.61) | <1.00E−16 | 0.59 (0.52-0.68) | 8.20E−14 |
| | Tertile | 0.49 (0.43-0.57) | <1.00E−16 | 0.57 (0.50-0.65) | <1.00E−16 |
| ER+ | Median | 0.60 (0.51-0.71) | 2.10E−09 | 0.65 (0.56-0.76) | 2.60E−08 |
| | Quartile | 0.62 (0.48-0.79) | 1.30E−04 | 0.69 (0.54-0.86) | 1.20E−03 |
| | Tertile | 0.54 (0.45-0.66) | 6.00E−10 | 0.63 (0.52-0.76) | 5.60E−07 |
| LN− | Median | 0.61 (0.49-0.76) | 9.00E−06 | 0.71 (0.58-0.86) | 4.20E−04 |
| | Quartile | 0.56 (0.44-0.72) | 3.50E−06 | 0.63 (0.50-0.79) | 6.00E−05 |
| | Tertile | 0.53 (0.42-0.66) | 2.20E−08 | 0.62 (0.50-0.76) | 4.60E−06 |
| LN+ | Median | 0.58 (0.42-0.80) | 9.70E−04 | 0.70 (0.52-0.93) | 1.30E−02 |
| | Quartile | 0.59 (0.42-0.84) | 3.00E−03 | 0.70 (0.50-0.98) | 3.50E−02 |
| | Tertile | 0.57 (0.41-0.78) | 4.00E−04 | 0.68 (0.50-0.91) | 9.70E−03 |
| | | DMFS | | | |
| | | 5 years | | 10 years | |
| Patient subgroup and cut-off | | HR (95% CI) | p-value | HR (95% CI) | p-value |
| All | Median | 0.59 (0.47-0.74) | 2.50E−06 | 0.59 (0.47-0.74) | 2.50E−06 |
| | Quartile | 0.58 (0.46-0.74) | 4.40E−06 | 0.58 (0.46-0.74) | 4.40E−06 |
| | Tertile | 0.57 (0.46-0.71) | 4.90E−07 | 0.57 (0.46-0.71) | 4.90E−07 |
| ER+ | Median | 0.62 (0.48-0.81) | 3.00E−04 | 0.62 (0.48-0.81) | 3.00E−04 |
| | Quartile | 0.56 (0.39-0.82) | 2.40E−03 | 0.56 (0.39-0.82) | 2.40E−03 |
| | Tertile | 0.57 (0.42-0.78) | 3.00E−04 | 0.57 (0.42-0.78) | 3.00E−04 |
| LN− | Median | 0.74 (0.54-1.00) | 4.60E−02 | 0.74 (0.54-1.00) | 4.50E−02 |
| | Quartile | 0.64 (0.46-0.89) | 7.00E−03 | 0.64 (0.46-0.89) | 7.00E−03 |
| | Tertile | 0.60 (0.44-0.81) | 1.00E−03 | 0.60 (0.44-0.81) | 1.00E−03 |
| LN+ | Median | 0.58 (0.35-0.96) | 3.20E−02 | 0.58 (0.35-0.96) | 3.20E−02 |
| | Quartile | 0.49 (0.29-0.83) | 6.90E−03 | 0.49 (0.29-0.83) | 6.90E−03 |
| | Tertile | 0.56 (0.34-0.92) | 2.10E−02 | 0.56 (0.34-0.92) | 2.10E−02 |

p-values are from Log rank test from KM-plotter

TABLE 8
details of antibodies and immunohistochemistry conditions
used for breast cancer TMA analysis in this study

| | | | | | | | Cut-off used for |
|---|---|---|---|---|---|---|---|
| | | | | | Antigen | Cellular | classification as |
| Antibody | Clone | Species | Source | Dilution | Retrieval* | Localization | ‘positive’ |
| ER | 6F11 | Mouse | Novocastra | 1:100 | Citrate | Nucleus | >1% |
| PR | 1A6 | Mouse | Novocastra | 1:200 | Citrate | Nucleus | >1% |
| HER2 | CB11 | Rabbit | Dako | 1:200 | Citrate | Cell | 3+ (>30%) |
| | | | | | | Membrane | |
| CK5/6 | D5/16B4 | Mouse | Chemicon | 1:400 | Citrate | Membrane + | Any positivity |
| | | | | | | Cytoplasm | |
| CK14 | LL002 | Mouse | Novocastra | 1:40 | Citrate | Membrane + | Any positivity |
| | | | | | | Cytoplasm | |
| EGFR | 31G7 | Mouse | Invitrogen | 1:100 | EDTA | Cell | Any positivity |
| | | | | | | Membrane | |
| Ki-67 | MIB-1 | Mouse | Dako | 1:200 | Citrate | Nucleus | Any positivity (20% |
| | | | | | | | cells stained classed |
| | | | | | | | as ‘Ki67-high’) |
| TTK | N1 | Mouse | Abcam | 1:100 | EDTA | Cytoplasm | 0 Negative |
| | | | | | | | 1 weak and focal |
| | | | | | | | staining |
| | | | | | | | 2 moderate-strong |
| | | | | | | | focal staining |
| | | | | | | | (collectively <50% |
| | | | | | | | tumor cells) |
| | | | | | | | 3 moderate-strong |
| | | | | | | | diffuse staining |
| | | | | | | | (>50% tumor cells) |
| | | | | | | | Regarding estimating |
| | | | | | | | % of cells stained, we |
| | | | | | | | disregarded mitotic |
| | | | | | | | cells to assess |
| | | | | | | | mitosis-independent |
| | | | | | | | expression of TTK |

*Antigen retrieval in 0.01M citric acid buffer (pH 6.0) at 125° C. for 5 min in a pressure cooker, or in 0.001M Tris/EDTA; pH 8.8, at 105° C. for 15 min in a pressure cooker.

TABLE 9
Multivariate analyses

| | P | Hazard | | P | Hazard | | P | Hazard |
|---|---|---|---|---|---|---|---|---|
| Covariants | value | Ratio | Covariants | value | Ratio | Covariants | value | Ratio |
| Grade | 0.7045 | 1.04 | Stage | 0 | 1.46 | AJCC | 0.0002 | 1.35 |
| | | (0.86- | | | (1.26- | stage T | | (1.16- |
| | | 1.25) | | | 1.68) | | | 1.58) |
| 10CIN | 0.0002 | 1.59 | 10CIN | 0 | 2.2 | AJCC | 0 | 1.73 |
| 2ER | | (1.25- | 2ER | | (1.73- | stage N | | (1.5- |
| signature | | 2.04) | signature | | 2.79) | | | 1.99) |
| | | | | | | 10CIN | 0.0075 | 1.35 |
| | | | | | | 2ER | | (1.08- |
| | | | | | | signature | | 1.69) |

### Example 2

### Materials and Methods

[0486] Meta-analysis of global gene expression in TNBC

[0487] We performed a meta-analysis of global gene expression data in the Oncomine™ database [37] (Compendia Bioscience, Ann Arbor, Mich.) using a primary filter for breast cancer (130 datasets), sample filter to use clinical specimens and dataset filters to use mRNA datasets with more 151 patients (22 datasets). Two additional filters were applied to perform two independent differential analyses. The first differential was metastatic event analysis at 5 years (metastatic events vs. no metastatic events, 7 datasets [51, 56-61]) and the second differential analysis was survival at 5 years (patients who died vs. patients who survived. 7 datasets [39, 57, 59, 61-64]). Deregulated genes were selected based on the median p-value of the median gene rank in overexpression or underexpression patterns across the datasets for each of the two differential analyses.

Deriving the 28-Signature (the TN Signature) The online tool KM-Plotter [38] which collates gene expression data from Affymterix platform for more than 40(K) breast cancer patients were used for developing the 28-gene signature. From the deregulated genes in primary tumors which led to metastatic or death events within 5 years discovered in the meta-analysis in Oncomine™, 166 genes were common in both survival events. These genes were then interrogated one by one in KM-Plotter restricting the univariate survival analysis to ER⁻ or BLBC subtypes. Genes which significantly associated with relapse-free survival (RFS). distant metastasis-free survival (DMFS) or overall survival (OS) in either ER⁻ or BLBC subtypes were short selected. The 96 genes that were significant in this filtering where then sorted for their level of significance as well as the prevalence of significance across the different survival outcomes (RFS. DMFS and OS) and across ER⁻ and BLBC subtypes. Based on this sorting, six groups of gene lists were obtained with different levels of survival association (Table 14). Each of these groups were then used as a metagene and the average expression of genes in each group was investigated for association with survival in KM-Plotter in ER and BLBC subtypes. Based on these analysis, four groups were selected and two were excluded. Furthermore, for two groups, the top 4 and 3 genes were found to be more prognostic than the rest of the group and these were selected. In total, the 7 genes (which their downregulation associates with poor survival) from these two groups and 21 genes (which their upregulation associates with poor survival) in the other two groups were selected to test for association with survival in KM-Plotter. These 28 genes showed the highest association with survival as a gene signature compared to any single gene in the original list or any groups from this list. These 28 genes were selected as the triple negative (TN) signature and was subjected to validation as described below.

### Validation of the TN Signature in Breast Cancer Cohorts

[0488] Three large breast cancer gene expression datasets were used for validation. The Research Online Cancer Knowledgebase (ROCK) dataset [40] (GSE47561; n=1570 patients) and the homogenous TNBC dataset [32] (GSE31519; n=579 TNBC patients) were obtained from Gene Expression Omnibus (GEO) and the data was imported into BRB-ArrayTools [65] (V4.2, Biometric Research Branch, NCI, Maryland, USA) with built in R Bioconductor packages. The Cancer Genome Atlas (TCGA) dataset [39]; using the Illumina HiSeq RNA-Seq arrays (n=1106 patients) or the Agilent custom arrays (Agilent 04502A-07-3) on 597 patients of the 1106 total patients, were obtained from the UCSC Genome Browser [66, 67]. The TN signature was investigated in each of these datasets where a score was devised to quantify the signature; the TN score=average expression of the 21 genes whose overexpression associated with poor survival÷average expression of the 7 genes whose underexpression associated with poor survival. The TN score for each tumor in each dataset was calculated and tumors were assigned as high or low TN score tumors by dichotomy across the median TN score in each dataset. In some cases, tertiles of the TN score in each dataset were used to classify tumors as high, intermediate or low TN score tumors and in other cases the quartiles of the TN score were used to classify tumors in the 1^{st}, 2^{nd}, 3^{rd} or 4^{th} quartiles. The survival of patients in high (over the median, last tertile of the 4th quartile) vs. low TN score groups was compared. Survival analyses were constructed using GraphPad® Prism v6.0 (GraphPad Software, CA, USA) and the Log-rank (Mantel-Cox) Test was used for statistical comparisons of survival curves.

Association of the TN Score and Signatures with Pathological Complete Responses (pCR) after Neoadjuvant Chemotherapy and Response to Endocrine Therapy

[0489] Datasets which performed gene expression profiling prior to neoadjuvant chemotherapy or endocrine therapy alone were obtained from GEO. The datasets used in this study for neoadjuvant chemotherapy and recorded pathological complete response (pCR) include: GSE18728 [42], GSE50948 [43], GSE20271 [44], GSE20194 [45]. GSE22226 [41, 46], GSE42822 [47] and GSE23988 [48]. For datasets which performed gene expression profiling prior to endocrine therapy (tamoxifen) and recorded patient survival include: GSE6532 [25] and GSE17705 [51]. These datasets using the Affymetrix gene expression array platforms were imported into BRB-ArrayTools and normalized as described previously [68]. Each tumor in the datasets were assigned as high or low score for our signatures as described in the previous sections. The rate of pCR after chemotherapy or the survival of patients after endocrine therapy were compared between high score tumors and low score tumors using GraphPad® Prism.

### Global Gene Expression Profiles Comparison by Class Comparison

[0490] Global gene expression comparison was carried out to compare tumors with high TN or iBCR scores to those with low TN or iBCR scores to characterize additional differences between these tumors and identify deregulated genes which could be suitable as for drug targeting. These comparisons were carried out in the large cohort of 1570 patients in the ROCK dataset and BRB-ArrayTools was used to perform the Class Comparison test. The two classes were high vs. low score tumors and the parameters selected in this plugin in ArrayTools were as follows: Type of univariate test used=Two-sample T-test; Class variable=TN score (high or low) or iBCR score (high or low); fold-change cutoff=1.5 fold; Permutation p-values for significant genes were computed based on 10000 random permutations and Nominal significance level of each univariate test: 0.05. The results from these analyses are shown in Tables 13 and 15-17.

Integration of the Agro and TN Signatures in the integrated Breast Cancer Recurrence (iBCR) Score

[0491] We previously published the Aggressiveness (Agro) signature and score also from meta-analysis and extensive validation and show that this signature is prognostic in ER+ breast cancer [36]. To test whether the Agro signatures could be integrated with the TN signature (prognostic in ER breast cancer) to produce an integrated test that is independent of ER status, several integration methods were investigated. The hypothesis behind the integration methods was to identify a direct relationship that can describe the relationship between the TN and Agro scores in both ER⁻ and ER⁺ breast cancer subtypes that is also in direct relationship with the integrated score. In other words, the integrated score would retain the information from each the Agro and TN scores relevant to their prognostic value in ER⁺ and ER⁻ breast cancers, respectively. The ROCK dataset was used to test the different methods of integration and the performance of these methods in the stratification of survival of ER⁺ and ER⁻ breast cancer. The addition or subtraction of the scores produced a direct relationship between the TN and Agro score and the produced integrated score (FIG. 36). These two methods were then analyzed for prognostication of ER⁺ and ER⁻ subtypes in the ROCK dataset and only the addition method retained prognostication in ER⁻ breast cancer (FIG. 37). Similarly, multiplying and dividing the TN and Agro scores were lit tested and an exponential and power curve relationships described the relation between the two scores and with the integrated score (FIG. 38). Again, these two methods were tested from prognostication in the ROCK dataset and only the multiplication method retained prognostication in ER⁻ breast cancer (FIG. 37), Because the multiplication and division methods produced exponential and power curves for the relationship between the scores, integration by raising one score to the power of the other score appeared reasonable. Exponential and power curves are the result of power equations. Indeed, integration by raising the TN score to the power of the Agro score was highly prognostic in both ER⁺ and ER⁻ breast cancers (FIGS. 37 and 38). This integrated score, the integrated Breast Cancer Recurrence (iBCR) score was in fact more prognostic in ER⁺ and ER⁻ patients in the ROCK dataset than the single Agro and TN scores, respectively. The iBCR score was validated in the ROCK and homogenous TNBC datasets (Affymetrix platform), the TCGA dataset (Illumina RNA-Seq platform) and the ISPY-1 trial dataset (GSE22226 [41, 46], Agilent platform), illustrating the platform-independence of the iBCR score which is driven by the platform independence of the Agro and TN signatures as they were discovered from meta-analysis irrespective of array platforms used from independent studies.

### Mining Drug Screen Studies

[0492] Two large studies which treated large panels of cancer cell lines with large panels of anticancer drugs were investigated to determine whether cell lines with high Agro, TN or iBCR scores show different sensitivity to particular anticancer drugs in comparison to cancer cell lines with low Agro, TN or iBCR scores. Briefly, the datasets of gene expression profiling from Genentech (mRNA Cancer Cell Line Profiles GSE10843), Pfizer (Pfizer Molecular Profile Data for Cell Line GSE34211) and Broad Institute/Novartis (Cancer Cell Line Encyclopedia [CCLE] GSE3613) were obtained from GEO and imported into ArrayTools as described earlier. The Agro, TN and iBCR scores for all the cell lines profiled were calculated and cell lines were assigned as high or low for each of the scores based on dichotomy across the median in each dataset. For cell lines which were profiled in more than one dataset, the average scores were used. Using this data, the sensitivity of cancer cell lines with high and low Agro, TN or iBCR scores was compared to those with low scores to anticancer drugs was investigated in two studies [49, 50]. Drugs which had significantly different IC50 in high score cell lines compared to low score cell lines are described herein. Statistical significance was determined from unpaired two-tailed t-test using GraphPad® Prism.

### Other Statistical Analysis

[0493] Univariate and multivariate Cox proportional hazards regression analyses were performed using MedCalc for Windows, version 12.7 (MedCalc Software, Ostend, Belgium).

### Results

### Meta-Analysis of Gene Expression Profile in Oncomine™

[0494] We performed a meta-analysis of published gene expression data, irrespective of platform or breast cancer subtype, using the Oncomine™ database [37] (version 4.5). We were able to compared the expression profiles of primary breast tumors from 512 patients who developed metastases vs. 732 patients who did not develop metastases at 5 years (7 datasets in total) to identify 500 overexpressed genes and 500 underexpressed genes in the metastasis cases (cutoff median p-value across the datasets <0.05 from a Student's t-test, FIG. 31). We also compared the expression profiles of 232 primary breast tumors from patients who died within 5 years vs. 879 patients who survived in 7 datasets and found 500 overexpressed genes and 500 underexpressed genes in the poor survivors (cutoff median p-value across the datasets <0.05 from a Student's t-test, FIG. 31). Since several datasets were annotated for one of these outcomes but not both, we rationalized that the union of these analyses is more appropriate particularly that death is the most likely outcome in metastatic disease. The union of the over- and expressed genes in tumors that associated with metastasis and those that associated with death within 5 years revealed common 101 overexpressed and 65 underexpressed genes (FIG. 19). These 166 deregulated genes were then subjected to training using the online tool KM-plotter 1381 to derive a 28 gene signature as described in methods below followed by validation of this signature, the TN signature, in several large cohorts of breast cancer gene expression datasets (FIG. 19).

### The TN Signature is Prognostic in TNBC, BLBC and ER⁻ Breast Cancer Subtypes

[0495] The 166 deregulated genes in primary breast tumors that associated with poor outcome discovered from the Oncomine™ meta-analysis were interrogated using KM-Plotter. The overexpression of 31 genes and the underexpression of 65 genes associated with RFS, DMFS or OS of BLBC or ER− breast cancer (Table 14). Based on the level of significance in univariate survival analysis and the prevalence of this significance across the different disease outcomes (RFS, DMFS and OS), a list of 21 overexpressed and 7 underexpressed genes (Table 1) were shortlisted as a signature with the strongest association with survival in both BLBC and ER breast cancer subtypes (FIG. 20).

[0496] The 28-gene signature, the TN signature, was then validated in multivariate survival analysis in two breast cancer cohorts, the homogenous TNBC dataset [32] and the Research Online Cancer Knowledgebase (ROCK) dataset [40]. We devised a score to quantify trends in the TN signature, the TN score, which is calculated as the ratio of the average expression of the 21 overexpressed genes to that of the 7 underexpressed genes. Dichotomy across the median TN score stratified the survival of TNBC (FIG. 21A). BLBC (FIG. 21B) and ER− (FIG. 21C) patients and outperformed all standard clinicopathological indicators. These analyses indicated that the TN score is an independent prognostic factor that identified TNBC, BLBC or ER⁻ patients with poor survival irrespective to tumor size and grade, patient age, lymph node status or treatment. The TN signature also outperformed all previously published signatures that are prognostic in ER, TNBC or BLBC subtypes [30-35] (FIG. 32).

[0497] While the discovery of the signature in Oncomine™ included datasets using the Affymterix, Illumina and Agilent platforms, the training and validation above was limited to the Affymterix platform. Thus, we validated the TN score in The Cancer Genome Atlas (TCGA) dataset [39] which used the lumina HiSeq RNA-seq platform. As shown in FIG. 22, the RFS of ER⁻ patients in the TCGA dataset was stratified by TN score and this stratification outperformed that by standard clinicopathological indicators. The original TCGA publication used Agilent custom arrays (Agilent 04502A-07-3) on 597 patients and we analyzed the prognosis of the TN score in this data. The TN score stratified the survival of ER patients in the Agilent TCGA data (FIG. 33). Altogether, the prognostic value of the TN signature/score was validated in large, independent cohorts of breast cancer in TNBC, BLBC and ER⁻ breast cancer subtypes irrespective of the gene expression array platforms used.

The TN Score and the Likelihood of pCR after Chemotherapy

[0498] Chemotherapy is a standard therapy for ER⁻ breast cancer and the only mode of therapy for ER⁻HER2⁻ (TNBC) breast cancer. Although, pathological complete response (pCR) differs by receptor status, it remains highly predictive of survival within the different breast cancer subtypes [41]. Given the association of the TN score with outcome in TNBC, BLBC and ER⁻ breast cancer, we questioned whether this score is also associated with pCR after chemotherapy. To this end. we analyzed publically available datasets of neoadjuvant chemotherapy trials which recorded pCR and performed pre-treatment gene expression profiling. As shown in FIG. 23A, pCR after chemotherapy in ER⁻/HER2⁻ patients was less likely after TX (GSE18728), AT/CMF (GSE50948) or FAC (GSE20271) chemotherapy regimens when these patients had a high TN score. TFAC chemotherapy regimen was less likely to produce pCR in high TN score tumors in one study (GSE20194) but without a significant association in a second study (GSE20271), ER⁻HER2⁻ tumors with high TN score had a trend to lower response to AC/T chemotherapy (GSE22226 AC/T). In contrast, pCR was achieved in 57% and 60% of ER⁻HER⁺ tumors with high TN score after treatment with the FEC/TX (GSE42822) and FAC/TX (GSE23988) regimens, respectively. Altogether, the rate of pCR stratified by the TN score was significantly different in either the low or high TN score tumor from the reported general 31% pCR rate in TNBC [9] (dotted line in FIG. 23A). In one dataset, the ISPY-1 trial (GSE22226). the relapse-free survival (RFS) was also recorded. As shown in FIG. 23B, pCR was a strong predictor of RFS in ER⁻HER2⁻ breast cancer as previously published [41]. The TN score was not only a strong predictor of RFS after chemotherapy but also could stratify the survival of patients who achieved pCR further in addition to the stratification of patients who did not achieve pCR to good and poor prognosis groups (FIG. 23B). This data indicates that the TN score is independent and has additional value to monitoring pCR after neoadjuvant chemotherapy in ER⁻HER2⁻ (TNBC) breast cancer patients. To further illustrate the utility of the TN score, we analyzed ER⁻ and BLBC patient outcome in KM-plotter for systemically untreated and treated patients separately. As summarized in Table 11 (FIG. 34 for survival curves), the TN signature was prognostic in either systemically untreated or treated ER− and BLBC subtypes.

### Therapeutic Targets Based on the TN Signature

[0499] The overexpressed genes in the TN signature contains novel genes which have limited literature describing their function, particularly in cancer. These genes includes GRHPR, NDUFC1, CAMSAP1, CETN3, EIF3K, STAU1, EXOSC7 and KCNG1. These genes are novel candidates for future studies to investigate the effect of their knockdown on the survival of ER⁻ or TNBC breast cancer cell lines. In addition, we took two approaches to identify possible therapeutic strategies envisioned by the TN signature to benefit the poor survival of patients identified by this signature. First, we compared the global gene expression profile of TNBC/BLBC tumors with high TN score to those with low TN score. Secondly, we analyzed published pre-clinical studies which treated cancer cell lines with panels of molecularly targeted drugs to determine whether cell lines with high TN score display sensitive to particular drugs. In the first approach, a class comparison between the global gene expression profiles of BLBC or ER− tumors with high TN score to those with low TN score was carried out in the ROCK dataset. In comparison to low TN score BLBC tumors, high TN score BLBC tumors overexpressed 171 probes and underexpressed 251 probes (Table 15). In a similar analysis, high TN score ER⁻ tumors overexpressed 307 probes and underexpressed 332 probes (Table 16). Of the overexpressed probes, 87 probes (82 genes) were commonly overexpressed in high TN score BLBC and ER⁻ breast cancer compared to low TN score counterparts. Of the 87 probes, 39 probes were prognostic in BLBC and ER− breast cancer (marked in bold in Table 15). More importantly, the 87 probes include genes which encode several kinases, enzymes and ion channels which could be targets or current for future drug development for the treatment of the high TN score tumors that have poor outcome.

[0500] In the second approach, published studies which surveyed panels of molecular drugs against, cancer cell lines were analyzed. The Cancer Cell Line Encyclopedia (CCLE) study [50] investigated the pharmacological profiles for 24 anticancer drugs across 479 cancer cell lines which were also profiled with gene expression arrays. We calculated the TN score for each cell line in this study and compared the sensitivity of these cell lines to the anticancer drugs according to the TN score. Cancer cell lines with high TN score were less sensitive to inhibition of ALK (TAE684) and BCR-ABL (Nilotinib) but more sensitive to the inhibition of HSP90 (Tanespimycin [17-AAG]) and EGFR (Erlotinib or Lapatinib) (FIG. 35). In a similar method, we also analyzed a second large study. Garnett et al. [49], which tested 130 drugs against more than 600 cancer cell lines. As shown in FIG. 24, cell lines with high TN score were less sensitive to inhibition of PARP (ABT-888). retinoic acid (ATRA), Bcl2 (ABT-263), DHFR (methotrexate), glucose (metformin) and p38MAPK (BIRB 0796). Two IGF1R inhibitors showed different results; high TN score cell lines were less sensitive to the OSI-906 inhibitor but more sensitive to the BMS-536924 inhibitor. As shown in FIG. 24, cell lines with high TN score were also sensitive to HSP90 inhibition (17-AAG and Elesclomol) in agreement with the findings from the CCLE study (FIG. 35), High TN score cell lines were also more sensitive to mTOR/PI3K (BEZ235) and MEK (RDEA-119) inhibition.

### Integration of the TN Score and the Aggressiveness Score

[0501] We have recently published the aggressiveness gene signature/score (Agro score) [36] from a meta-analysis in Oncomine™ and validated that this score is prognostic in ER⁺ breast cancer at the gene level. ER⁻ breast cancer, BLBC and TNBC almost consistently express high level of the Agro score thus this signature was not prognostic in these subtypes. We further showed that one of these genes, TTK/MPS1, is upregulated in TNBC cell lines and some ER− negative cell lines, and that TTK is a therapeutic target in these cell lines. Moreover, we showed that the TTK protein level by immunohistochemistry (IHC) is prognostic in very aggressive subgroups of breast cancer including high grade, proliferative tumors, lymph node positive, TNBC and HER2⁺ subtypes [36]. The integration of the TN gene signature (prognostic in ER⁻/BLBC/TNBC) and the Agro gene signature (prognostic in ER⁺) would allow one integrated signature and score which will be prognostic in breast cancer irrespective of subtypes. As detailed in the methods section, the addition, subtraction, multiplication or division of the TN and Agro scores were investigated in the ROCK dataset to identify a direct relationship that would retain the information provided from each of the scores. A linear relationship was observed by the addition or subtraction of the TN and Agro scores (FIG. 36), but only the integration by addition was prognostic in ER− patients (FIG. 37). On the other hand, the multiplication and division of the TN and Agro score produced exponential and power curves relationships, respectively (FIG. 38). Only the multiplication of the scores was prognostic in ER− breast cancer (FIG. 37). Since multiplication and division produced exponential and power curves for the relationship between the TN and Agro score, we also tested integration by one score raised to the power of the second score. Indeed, the TN score raised to the power of Agro score was highly prognostic in ER− and ER+ patients in the ROCK dataset (FIG. 37). This method to integrate the TN and Agro scores, the integrated breast cancer recurrence (iBCR) score, was prognostic in all patients, ER and ER+ patients in the ROCK dataset (FIG. 25) and the TCGA dataset (FIG. 26). Moreover, the iBCR score was as prognostic as the TN score in the homogenous TNBC dataset [32] (FIG. 39), supporting the iBCR score as prognostic test in breast cancer.

The iBCR Score and the Likelihood of pCR after Chemotherapy

[0502] The association of the iBCR score with patient survival and the likelihood of pCR after chemotherapy was investigated in the ISPY-1 trial (GSE22226). The RFS of ER⁻/MER2⁻ patients was stratified by iBCR score better than the TN score alone (FIG. 27). High iBCR score ER⁻/HER2⁻ patients were less likely to achieve pCR (FIG. 27), which could explain the poorer survival of these patients. In ER⁺ breast cancer, the iBCR score stratified the RFS patients similarly to the Agro score. Although higher likelihood pCR was observed in high iBCR score ER+ tumors (FIG. 27), this subgroup had poor RFS. This can be explained by the small number of ER⁺ patients who achieved pCR (10/62 [16%] vs. 10/34 [29%] in ER⁻HER2⁻). These results provide further validation and evidence for the value of the iBCR score as a single test which incorporates the Agro score (prognostic in ER⁺) and the TN score (prognostic in ER⁻) The results in FIG. 25 from the ROCK dataset (Affymetrix platform), FIG. 26 from the TCGA dataset (Illumina platform) and FIG. 27 from the ISPY-1 trial (Agilent platform) also provide evidence for the robustness of the Agro and TN scores and the derived iBCR score across independent studies across the three major gene expression array platforms. Next, the association of the iBCR score with pCR was investigated in other neoadjuvant chemotherapy datasets in both ER-HER2⁻ and ER⁺ patients. pCR was less likely in high iBCR ER/HER patients after TX (GSE18728) chemotherapy regimen and not different to low iBCR ER−/HER2− patients when treated with AT/CMF (GSE50948). In the other datasets, pCR was more likely in high iBCR score ER−/HER2− patients after treatment with FAC (GSE20271), TFAC (GSE20271 and GSE20194), FEC/TX (GSE42822) and FAC/TX (GSE23988) neoadjuvant chemotherapy regimens (FIG. 28A).

[0503] As shown in the summary from these four studies in Table 12, of the total 183 ER HER2⁻ patients, 120 patients (65.6%) had high iBCR score and of these 54 patients (29.5%) achieved pCR while 66 patients (36.1%) did not achieve pCR. The larger number of patients with high iBCR score that did not achieving pCR (66/120, 55%) and that recurrence may be observed on high iBCR score patients after pCR (55/120, 45%) could explain the poorer survival of high iBCR score ER⁻HER2⁻ patients (40-50% survival at 10 years in FIG. 25 and FIG. 26). Based on these studies and that chemotherapy is the mainstay in the treatment of ER⁻/HER2⁻ breast cancer, low iBCR score patients may be spared from additional treatments particularly if they achieve pCR after chemotherapy. On the other hand, high iBCR ER-HER2− patients and particularly those who do not achieve pCR should be offered additional therapy which could be based on the upregulated genes in the Agro or TN signatures or based on other overexpressed genes in these tumors (Tables 15 and 16) or from the pre-clinical analysis we performed from drug sensitivity studies (FIGS. 24 and 35). High iBCR score in ER⁺ was associated with higher likelihood of pCR after AT/CMF (GSE50948), TX (GSE18728), TFAC (GSE20271 and GSE20194) and FAC/TX (GSE23988) neoadjuvant chemotherapy regimens (FIG. 38B). Despite this higher pCR likelihood, high iBCR ER+ patients have poorer survival (FIGS. 25 and 26) which could be explained by the small number of ER+ patients who achieve pCR (of the 207 ER⁺ patients in the above five studies, 5 [2.5%] with low iBCR and 20 [9.7%] with high iBCR score achieved pCR). Thus. for ER+ breast cancer where a decision about including chemotherapy with the standard endocrine therapy in the treatment planning may be informed by the iBCR score. The value of the iBCR score in the treatment planning of ER+ patients is the described next section.

The iBCR Score and the Treatment of ER⁺ Breast Cancer

[0504] ER⁺ breast cancer patients are treated with endocrine therapy, particularly tamoxifen. When these patients are lymph node positive (N0), adjuvant chemotherapy is also included. For lymph node negative (N0) ER⁺ patients, decision to include chemotherapy is less certain as good prognosis patients (small and lower grade tumors) would be over-treated if chemotherapy is included whereas poorer prognosis patients (larger and higher grade tumors) would be under-treated if chemotherapy is not included. This clinical decision has been the motivation for the development of Oncotype Dx® recurrence score, the MammaPrint and more recently the PAM50 risk of recurrence score. We have previously published that the Agro score outperformed the Oncotype Dx and the MammaPrint tests in multivariate survival analysis in the METABRIC dataset of 2000 patients [36] This finding is further supported by direct comparison of the Agro score to Oncotype Dx (FIG. 40) and MammaPrint (FIG. 41) in all ER⁺ patients and in the N0 and N1 subsets. For the iBCR score, as shown in FIG. 29A, this score was prognostic in ER⁺ N0 patients who were not treated with tamoxifen indicating that high iBCR ER⁺ N0 patients should be treated with tamoxifen. When ER+ N0 or N1 patients are treated with tamoxifen, the iBCR score can still identify patients who have poor RFS (FIG. 29B) and DMFS (FIG. 29C). Thus, ER+ N0 or N1 patients with high iBCR score may benefit from the inclusion of adjuvant chemotherapy in their treatment as these patients may experience better pCR (FIG. 2813). Nonetheless, as pCR. rate in ER⁺ is not high, high iBCR score ER+ patients, particularly N1, should be offered additional targeted therapies. The type of targeted therapies for these patients is suggested in the next section.

The iBCR Score Predicts Therapies for ER⁻/HER2⁻ and ER⁺ and Breast Cancer Subtypes

[0505] The overexpressed genes in the Agro and TN signature contain targetable genes which could be useful for therapeutic intervention against the high iBCR tumors which have poor survival after the standard treatments. Similar to the analysis performed for the TN signature above, we took two approached to identify additional possible targets in the high iBCR score breast tumors. In the first approach, a class comparison between the global gene expression profiles of ER⁺ or ER⁻ tumors with high iBCR score to those with low iBCR score was carried out in the ROCK dataset. The produced gene-list (1178 probes, data not shown) was then filtered by comparison to normal breast tissue which was also profiled in this dataset. In comparison to low iBCR score tumors and normal breast tissue, high iBCR score tumors overexpressed 204 probes (181 genes) and underexpressed 124 probes (116 genes) (Table 17). Of the 181 overexpressed genes, 134 genes were specifically upregulated in high iBCR score ER⁺ vs. normal breast and low iBCR ER⁺ and 95 genes were specifically upregulated in high iBCR score ER⁻ vs. normal breast and low iBCR ER⁻. As shown in Table 13, 49 genes were uniquely upregulated in high iBCR score ER− tumors compared to low score iBCR score ER⁻ tumors and normal breast tissue. Similar comparison revealed that high iBCR score ER⁺ tumors have unique upregulation of 86 genes. High iBCR score ER and ER⁺ tumors commonly overexpressed 46 genes in comparison to low score iBCR counterparts and normal breast tissue. These genes encode several kinases, enzymes and ion channels which could be targets for current or future drug development for the treatment of the high iBCR score tumors with poor outcome. Of the downregulated probes, a particularly interesting hit was the micro-RNA (miRNA) hsa-mir-568 (9.3- and 2.2-fold downregulated in high iBCR score ER⁻ vs. normal breast and low iBCR score ER⁻, respectively; 5.6- and 2.9-fold downregulated in high iBGR score ER⁺ vs. normal breast and low iBCR score ER⁺, respectively). This downregulated miRNA in the high iBCR score tumors targets several of the upregulated genes in these tumors, particularly those which are upregulated compared to normal breast tissue (Table 18). This miRNA could be a genomic-based treatment against high iBCR score breast cancers.

[0506] IS In the second approach, again similar to the above analysis for the TN score, published studies of drug screens were analyzed for the association of the iBCR score with sensitivity of cancer cell lines to anti-cancer drugs. In the CCLE study (FIG. 42), cancer cell lines with high iBCR score were less sensitive to inhibition of ALK (TAE684) and BCR-ABL (Nilotinib) similar to results from the TN score. In addition. high iBCR cell lines were less sensitive to inhibition of FGFR (TKI258) and IGF1R (AEW541). High iBCR score cell lines were more sensitive to the inhibition of HSP90 (Tanespimycin [17-AAG]) (FIG. 42). In the second large study by Garnett et al. [49], high iBCR score cell lines were more sensitive to low iBCR score cell lines to 8 anticancer drugs (FIG. 30). These include inhibitors of HSP90 (17AAG), mTOR/PI3K (BEZ235) and IGF1R (BMS-536924) as also observed in the TN score results. Additionally, high iBCR score cell lines were more sensitive to inhibition of PI3K (GDC0941). mTOR (JW-7-25-1), XIAP (Embelin) and PLK1 (B1-2536) which also matched results from Agro score results (FIG. 30). The Agro score also identified sensitivity to inhibition of RSK (CMK). MEK (PD0325901) and DNA damage (Bleomycin). Similar to results from high TN score, high iBCR score cell lines were also less sensitive to the inhibition of PARP (ABT-888 and AZD-2281), retinoic acid (ATRA). Bcl2 (ABT-263), DHFR (methotrexate) and glucose (metformin). Additionally, high iBCR score cell lines were less sensitive to inhibition of SYK (BAY613606), HDAC (Vorinostat) and BCR-ABL (Nilotinib) and p38MAPK (BIRB 0796). High Agro score cell lines were less sensitive to an additional drug against GSK3A/B (SB216763). Altogether, the TN score (FIGS. 24 and 35) and the Agro score and the combined iBCR score (FIGS. 30 and 42) associate with sensitivity to several anticancer drugs and future experimental validation would establish these scores as companion diagnostic for these drugs and benefit breast cancer patients by directing these drugs to the high score patients with poor survival.

Sensitivity of Breast Cancer Cell Lines to Targeted Inhibitors According to the iBCR Score

[0507] Breast cancer cell lines (10 cell lines); BT-549, MDA-MB-231, MDA-MB-436, MDA-MB-468, BT-20, Hs.578T, BT-474, MCF-7, T-47D, and ZR-75-1, were cultured in the absence or presence of escalating doses of 24 anti-cancer drugs. The survival of cells was determined six days in comparison to untreated cells using the MTS/MTA assay. The response of the cell lines to the drugs was analyzed in GraphPad® Prism using a dose response curve to calculate the log₁₀ of IC50 (IC50 is the dose required to kill 50% of the cells). Sensitivity was presented as the −log₁₀[IC50]. This drug screen which we published previously (Al-Ejeh et al., Oncotarget, 2014) was re-analyzed according to the iBCR score. The gene expression datasets of 51 breast cancer cell lines by Neve et al. (Cancer Cell, 2006), was analyzed to calculate the Agro and TN scores for each cell line to calculate the iBCR score. Each cell line was assigned as low of high iBCR score by dichotomy across the median of all the cell lines in the Neve et al. dataset. Based on the low or high iBCR score classification, the sensitivity of the 10 cell lines used in our screen was compared between high iBCR score cell lines (5 cell lines) to low iBCR score cell lines (5 cell lines). As shown in FIG. 47, high iBCR score cell lines were significantly more sensitive to the inhibition of p38MAPK (LY2228820). PLC□ (U73122), INK (SP600125), PAK1 MEK (AS703026 and AZD6244), ERK5 (XMD 8-92 and BIX02188). HSP90 (17-AAa PF0429113 and AUY922), IGF1R (GSK1904529A) and EGFR (Afatinib). The results from our screen are in agreement with the higher sensitivity of high iBCR score cancer cell lines to HSP90, IGF1R and MEK inhibitors we identified from the two previously published large cell line studies.

### Discussion

[0508] Our meta-analysis of gene expression datasets in the Oncomine™ database has previously identified a signature, the Aggressiveness signature (Agro signature), which was prognostic in ER⁺ breast cancer. We validated one of the genes in this signature, TTK/MPS1, by IEC and found that TTK positivity in interphase cells (exclusive of mitotic cells) was prognostic in highly aggressive breast cancers such as high grade, high grade and lymph node positive and highly proliferative (Ki67 positive) cases [36]. In this study, we used our meta-analysis approach to identify a second signature, the triple negative signature (TN signature), which was highly prognostic in ER⁻, TNBC and BLBC subtypes. The TN signature outperformed all standard clincopatholical indicators in multivariate survival analysis and also outperformed published signatures in ER− breast cancer. We were also able to integrate the Agro signature (prognostic in ER⁺ breast cancer) to produce the integrated Breast Cancer Recurrence (iBCR) test. The two signatures and the iBCR were validated in large independent cohorts of breast cancer studies irrespective of the gene expression arrays used indicating the experimenter/technology independence of our signatures. Importantly, both the Agro and TN signatures and the iBCR test associated with response and outcome after endocrine therapy for ER⁺ and neoadjuvant chemotherapy for ER: and ER⁺ breast cancers. Moreover, by comparison of the global gene expression profiles of high iBCR score tumors to low iBCR score tumors, we were able to identify several overexpressed targets which can be used for the targeted therapy of these poor prognosis patients who are not really benefiting from the current treatment standards. In addition, mining of large preclinical studies of drug screens against cancer cell lines showed that the signatures and iBCR score predict higher sensitivity of cell lines to particular drugs. Thus. the signatures and the iBCR test could be used as a companion diagnostic to direct targeted therapies to those patients who would benefit from these treatments to increase their low survival rates. Altogether, our studies have not only extensively illustrated the potential of our signatures in personalized medicine, but may also shed light for future studies to understand the underlying mechanisms for the aggressiveness of tumors that the iBCR test identified that lead to poor survival To date, there is an unmet medical need for the prognostication of ER− breast cancer and the development of effective therapies against these tumors particularly when lacking HER2 expression. Chemotherapy remains to be the only standard therapy in these patients and the response rate after chemotherapy in the neoadjuvant setting is reported as 31% in ER HER2⁻ (TNBC) patients [9]. Identifying patients who would truly benefit from chemotherapy would aid clinicians to determine patients who may require longer or additional treatment regimens including investigational clinical trial enrolment. Our signatures and the iBCR score predict higher pCR after chemotherapy in patients who have high scores compared to those with low score. The low score patients have better survival and may not require additional therapy. On the other hand, despite the higher pCR in high score patients, this patient subgroup still has poor survival and recurrences were present even after achieving pCR in high score patients when we analyzed the data from the 1SPY-1 trial. Our results from comparative analysis and mining pre-clinical drug screens identified several targets and sensitivity to drugs in development. Thus, ER− and particularly TNBC patients with high scores for our signatures/iBCR test may benefit from the inclusion of therapies envisioned by these signatures to increase their survival rates. Such clinical development will depend on future prospective validation of our signatures and the iBCR test in clinical trials and pre-clinical studies.

[0509] In ER⁺ breast cancer, three commercial tests exist for clinical decisions to spare or include adjuvant chemotherapy with the standard endocrine therapy; Oncotype Dx®, MammaPrint® and Prosigna®. These have been validated for ER⁺ lymph node negative (N0) breast cancer patients treated with endocrine therapy whether patients with high risk according to these tests are recommended for adjuvant chemotherapy. Our signatures and the iBCR test outperformed these tests in a direct comparison in ER⁺ N0 patient-survival after tamoxifen therapy. Moreover, our tests also predicted the response of ER⁺ patients to chemotherapy and importantly could predict sensitivity to targeted therapies. The current commercial tests do not have this capability. Importantly, our signatures and the iBCR test was also prognostic in the subgroup with unmet need, ER⁺ lymph node positive breast cancer (ER⁺ N1). The survival of these patients was stratified to poor and good prognosis groups by our signatures and iBCR test which also informed whether these patients are benefiting from endocrine therapy. Clinical validation of our signatures and the iBCR test along with validation of drug sensitivity predictions would aid the development of new treatment regimens for ER⁺ patients who are at high risk of relapse or metastatic spread after the current treatment standards.

[0510] The comparison of aggressive ER⁻ tumors identified by our signatures to their counterparts and to normal breast tissue identified several kinases, enzymes (redox particularly) and potassium channels which could inform new directions in developing targeted treatments against ER⁻ breast cancer. On the other hand, for aggressive ER⁺ tumors identified by our signatures, although targets were not restricted to cell cycle and proliferation, these functions were notably enriched. This high proliferation profile could explain the higher pCR in these tumors after chemotherapy as proliferative tumors would be more responsive to chemotherapeutics. Nonetheless, we have previously clarified that the overexpressed genes in the Agro signature, thus the iBCR test, are genes that are involved in kinetochore binding and chromosome segregations and that the signature is prognostic even in proliferative tumors (high Ki67 expression) [36]. Deregulation of genes involved in chromosome segregation would produce aneuploidy and chromosomal instability (CIN) [52]. At least in viva, chemotherapy has been shown to induce the proliferation quiescent aneuploid cells as a mechanism for therapy resistance [53]. In support of the notion that high Agro Score is related to aneuploidy, analysis of the copy number variations (CNVs) TCGA data showed that high Agro score tumours, compared to low Agro score tumors, have high level of CNVs, particularly those involving whole chromosomes or chromosome arms (FIG. 43). Thus, although proliferation may be a characteristic of high Agro/iBCR score ER⁺ tumors, these tumors appear to be aneuploid. In line with this notion, the sensitivity of high Agro/iBCR score cell lines to PLK1 and HSP90 inhibition (FIG. 30) and aurora kinase inhibitors (FIG. 44) support that high Agro/iBCR scores predict sensitivity to anti-aneuploid therapy. PLK1 and Aurora kinases are classical targets in aneuploidy and HSP90 inhibition has been reported to selectively kill aneuploid cancer cells [54]. HSP90 sensitivity was also found for high TN score tumors and interestingly, we have previously identified HSP90 as a target in TNBC by kinome profiling of breast cancer. We showed that HSP90 inhibition in combination therapy is effective in vitro and in vivo [55]. We propose that anti-aneuploid drugs should be effective against ER⁺ tumors with high Agro/iBCR scores including PLK1, Aurora kinase and HSP90 inhibitors and that HSP90 inhibition should be effective in high TN/iBCR score ER⁻ tumors. While other therapies envisioned by our signatures and the iBCR test should also be investigated, the above targets represent first line targets for initial validation and development.

[0511] In conclusion, our meta-analysis in Oncomine™ and extensive subsequent validation and analysis have developed novel signatures and an integrated genomic test for the prognosis of breast cancer and prediction of response to standard treatments irrespective of ER status. The novel signatures and their integration also have the potential as companion diagnostic tests for several classes of targeted therapies in breast cancer patients who suffer poor survival. Future validation and clinical development of our signatures and the iBCR test holds a great potential and impact on personalized and precision medicine for breast cancer. Finally, it should be noted that the iBCR test has value in the prognosis of several other cancers (FIG. 45) and particularly in lung adenocarcinoma (FIG. 46), thus our approach and novel signatures may extend benefit to other cancer types.

### REFERENCES

[0512] 1. Kang, S. P., M. Martel, and L. N. Harris, Triple negative breast cancer: current understanding of biology and treatment options. Curr Opin Obstet Gynecol, 2008. 20(1): p. 40-6.
[0513] 2. Schneider, B. P., et al., Triple-negative breast cancer: risk factors to potential targets. Clin Cancer Res, 2008. 14(24): p. 8010-8.
[0514] 3. Rakha, E. A., J. S. Reis-Filho, and I. O. Ellis, Basal-like breast cancer: a critical review. J Clin Oncol, 2008. 26(15): p. 2568-81.
[0515] 4. Fulford, L. G., et al., Basal-like grade III invasive ductal carcinoma of the breast: patterns of metastasis and long-term survival. Breast Cancer Res, 2007. 9(1): p. R4.
[0516] 5. Goldstein, L, J., et al., Concurrent doxorubicin plus docetaxel is not more effective than concurrent doxorubicin plus cyclophosphamide in operable breast cancerivith 0 to 3 positive axillary nodes: North American Breast Cancer Intergroup Trial E 2197. J Clin Oncol, 2008. 26(25): p. 4092-9.
[0517] 6. Kean, B., et al., Prognostic impact of clinicopathologic parameters in stage II/III breast cancer treated with neoadjuvant docetaxel and doxorubicin chemotherapy: paradoxical features of the triple negative breast cancer. BMC Cancer, 2007. 7: p. 203.
[0518] 7. Liedtke, C., et at, Response to neoadjuvant therapy and long-term survival in patients with triple-negative breast cancer. J Clin Oncol, 2008. 26(8): p. 1275-81.
[0519] 8. Carey, L. A., et al., The triple negative paradox: primary tumor chemosensitivity of breast cancer subtypes. Clin Cancer Res, 2007. 13(8): p. 2329-34.
[0520] 9. von Minckwitz, G., et al., Definition and impact of pathologic complete response on prognosis after neoadjuvant chemotherapy in various intrinsic breast cancer subtypes. J Clin Oncol, 2012. 30(15): p. 1796-804.
[0521] 10. Sorlie, T., et at, Gene expression patterns of breast carcinomas distinguish tumor subclasses with clinical implications. Proc Natl Acad Sci USA, 2001. 98(19): p. 10869-74.
[0522] 11. Perou, C. M., et al., Molecular portraits of human breast tumours. Nature, 2000. 406(6797): p. 747-52.
[0523] 12. Hu, Z., et al., The molecular portraits of breast tumors are conserved across microarray platforms. BMC Genomics, 2006. 7: p. 96-107.
[0524] 13. Parker, J. S., et al., Supervised Risk Predictor of Breast cancer Based on. Intrinsic Subtypes. J Clin Oncol, 2009.
[0525] 14. Weigelt, B., et al., Breast cancer molecular profiling with single sample predictors: a retrospective analysis. Lancet Oncol. 11(4): p. 339-49.
[0526] 15. Weigelt, B., et al., Molecular portraits and 70-gene prognosis signature are preserved throughout the metastatic process of breast cancer. Cancer Res, 2005. 65(20): p. 9155-8.
[0527] 16, Parker, J. S., et al., Supervised risk predictor of breast cancer based on intrinsic subtypes. J Clin Oncol, 2009. 27(8): p. 1160-7.
[0528] 17, Lehmann, B. D., et al., Identification of human triple-negative breast cancer subtypes and preclinical models for selection of targeted therapies. J Clin Invest, 2011. 121(7); p. 2750-67.
[0529] 18. Shah. S. P. et al., The clonal and mutational evolution spectrum of primary triple-negative breast cancers. Nature, 2012. 486(7403): p. 395-9.
[0530] 19. Irshad, S., P. Ellis, and A. Tutt, Molecular heterogeneity of triple-negative breast cancer and its clinical implications. Cuff Opin Oncol, 2011. 23(6): p. 566-77.
[0531] 20. Criscitiello, C. et al., Understanding the biology of triple-negative breast cancer. Ann Oncol, 2012. 23 Suppl 6: p. vi13-8.
[0532] 21. Masuda, R, et al., Differential response to neoadjuvant chemotherapy among 7 triple-negative breast cancer molecular subtypes. Clin Cancer Res, 2013. 19(19): p. 5533-40.
[0533] 22. van't Veer, Li., et al., Gene expression profiling predicts clinical outcome of breast cancer. Nature, 2002. 415(6871): p. 530-6.
[0534] 23. Paik, S., et al., A multigene assay to predict recurrence of tamoxifen-treated. node-negative breast cancer. N Engl J Med, 2004. 351(27): p. 2817-26,
[0535] 24, Buyse, M., et al., Validation and clinical utility of a 70-gene prognostic signature for women with node-negative breast cancer. J Natl Cancer Inst, 2006. 98(17): p. 1183-92.
[0536] 25. Loi, S., et al., Definition of clinically distinct molecular subtypes in estrogen receptor-positive breast carcinomas through genomic grade. J Clin Oncol, 2007. 25(10): p. 1239-46.
[0537] 26. Ma, X. J., et al., A five-gene molecular grade index and HOXB13:IL17BR are complementary prognostic factors in early stage breast cancer. Clin Cancer Res, 2008. 14(9): p. 2601-8.
[0538] 27, Ma, X. J., et al., A two-gene expression ratio predicts clinical outcome in breast cancer patients treated with tamoxifen. Cancer Cell, 2004, 5(6): p. 607-16.
[0539] 28. Sotiriou, C., et al., Gene expression profiling in breast cancer . . . understanding the molecular basis of histologic grade to improve prognosis. Journal of the National Cancer Institute, 2006. 98(4): p. 262-72.
[0540] 29. Dowsett, M., et al., Comparison of PAM50 risk of recurrence score with oncotype DX and IHC4 for predicting risk of distant recurrence after endocrine therapy. J Clin Oncol, 2013. 31(22): p. 2783-90.
[0541] 30. Yau, C., et al., A multigene predictor of metastatic outcome in early stage hormone receptor-negative and triple-negative breast cancer. Breast Cancer Res, 2010. 12(5): p. R85.
[0542] 31. Rody, A., et al., A clinically relevant gene signature in triple negative and basal-like breast cancer. Breast Cancer Res, 2011. 13(5): p. R97.
[0543] 32. Karn, T., et al., Homogeneous datasets of triple negative breast cancers enable the identification of novel prognostic and predictive signatures. PLoS One, 2011. 6(12): p. e28403.
[0544] 33. Yu, K. D., et al., Identification of prognosis-relevant subgroups in patients with chemoresistant triple-negative breast cancer. Clin Cancer Res, 2013. 19(10): p. 2723-33.
[0545] 34. Lee, U., et al., A prognostic gene signature for metastasis-free survival of triple negative breast cancer patients. PLoS One, 2013. 8(12): p. e82125.
[0546] 35. Hallett, R. M., et al., A gene signature for predicting outcome in patients with basal-like breast cancer. Sci Rep, 2012. 2: p. 227.
[0547] 36. Al-Ejeh, F., et al., Mew-analysis of the global gene expression profile of triple-negative breast cancer identifies genes for the prognostication and treatment of aggressive breast cancer. Oncogenesis, 2014. 3: p. e
[0548] 37. Rhodes, D. R., et al., ONCOMINE: a cancer microarray database and integrated data-mining platform. Neoplasia, 2004. 6(1): p. 1-6.
[0549] 38. Gyorffy, B., et al., An online survival analysis tool to rapidly assess the effect of 22,277 genes on breast cancer prognosis using microarray data of 1,809 patients. Breast Cancer Res Treat, 2010. 123(3): p. 725-31.
[0550] 39. TCGA, Comprehensive molecular portraits of human breast tumours. Nature, 2012. 490(7418): p. 61-70.
[0551] 40, Ur-Rehman, S., et al., ROCK: a resource for integrative breast cancer data analysis. Breast Cancer Res Treat, 2013. 139(3): p. 907-21.
[0552] 41. Esserman, L. J., et al., Pathologic complete response predicts recurrence-free survival more effectively by cancer subset: results from the I-SPY 1 TRIAL-CALGB 150007/150012, ACRIN 6657, J Clin Oncol, 2012. 30(26): p. 3242-9.
[0553] 42. Korde, L. A., et al., Gene expression pathway analysis to predict response to neoadjuvant docetaxel and capecitabine for breast cancer. Breast Cancer Res Treat, 2010. 119(3); p. 685-99.
[0554] 43. Prat, A., et al., Research-based PAM50 subtype predictor identifies higher responses and improved survival outcomes in. HER2-positive breast cancer in the NOAH study. Chin Cancer Res, 2014. 20(2): p. 511-21.
[0555] 44, Tabchy, A., et al., Evaluation of a 30-gene paclitaxel, fluorouracil, doxorubicin, and cyclophosphamide chemotherapy response predictor in a multicenter randomized trial in breast cancer. Clin Cancer Res, 2010. 16(21): p. 5351-61.
[0556] 45. Popovici, V., et al., Effect of training-sample size and classification difficulty on the accuracy of genomic predictors. Breast Cancer Res, 2010. 12(1): p. R5.
[0557] 46. Esserman, L. J., et al., Chemotherapy response and recurrence-free survival in neoadjuvant breast cancer depends on biomarker profiles: results from the I-SPY 1 TRIAL (CALGB 150007/150012; ACRIN 6657). Breast Cancer Res Treat, 2012. 132(3): p. 1049-62.
[0558] 47. Shen, K., et al., Cell line derived multi-gene predictor of pathologic response to neoadjuvant chemotherapy in breast cancer: a validation study on US Oncology 02-103 clinical trial. BMC Med Genomics, 2012. 5: p. 51.
[0559] 48. Iwamoto, T., et al., Gene pathways associated with prognosis and chemotherapy sensitivity in molecular subtypes of breast cancer. J Natl Cancer Inst, 2011. 103(3): p. 264-72.
[0560] 49. Garnett, M. J., et al., Systematic identification of genomic markers of drug sensitivity in cancer cells. Nature, 2012. 483(7391): p. 570-5.
[0561] 50. Barretina, J., et al., The Cancer Cell Line Encyclopedia enables predictive modelling of anticancer drug sensitivity. Nature, 2012. 483(7391): p. 603-7.
[0562] 51. Symmans, W. F., et al., Genomic index of sensitivity to endocrine therapy for breast cancer. J Clin Oncol, 2010. 28(27): p. 4111-9.
[0563] 52, Bakhoum, S. F. and D. A. Compton, Chromosomal instability and cancer: a complex relationship with therapeutic potential. J Clin Invest, 2012, 122(4): p. 1138-43.
[0564] 53. Kusumbe, A. P. and S. A. Bapal, Cancer stem cells and aneuploid populations within developing tumors are the major determinants of tumor dormancy. Cancer Res, 2009. 69(24): p. 9245-53.
[0565] 54. Tang, Y. C., et al., identification of aneuploidy-selective antiproliferation compounds, Cell, 2011. 144(4): p. 499-512.
[0566] 55. Al-Ejeh, F., et al., Kinome profiling reveals breast cancer heterogeneity and identifies targeted therapeutic opportunities for triple negative breast cancer. Oncotarget, 2014.
[0567] 56. Bos, P. D., et al., Genes that mediate breast cancer metastasis to the brain, Nature, 2009. 459(7249): p. 1005-9.
[0568] 57. Desmedt, C., et al., Strong time dependence of the 76-gene prognostic signature for node-negative breast cancer patients in the TRANSBIG multicenter independent validation series, Clin Cancer Res, 2007. 13(11): p. 3207-14.
[0569] 58. Hatzis, C., et al., A genomic predictor of response and survival following taxane-anthracycline chemotherapy for invasive breast cancer. JAMA, 2011. 305(18): p. 1873-81.
[0570] 59. Kao, K J., et al., Correlation of microarray-based breast cancer molecular subtypes and clinical outcomes; implications for treatment optimization. BMC Cancer, 2011. 11: p. 143.
[0571] 60. Schmidt, M., et al., The humoral immune system has a key prognostic impact in node-negative breast cancer. Cancer Res, 2008. 68(13): p. 5405-13.
[0572] 61. van de Vijver, M. J., et al., A gene-expression signature as a predictor of survival in breast cancer. N Engl J Med, 2002. 347(25): p, 1999-2009.
[0573] 62. Bild, A. H., et al., Oncogenic pathway signatures in human cancers as a guide to targeted therapies. Nature, 2006. 439(7074): p. 353-7.
[0574] 63. Pawitan, Y., et al., Gene expression profiling spares early breast cancer patients from adjuvant therapy; derived and validated in two population-based cohorts. Breast Cancer Res, 2005. 7(6): p. R953-64.
[0575] 64. Sorlie, To, et al., Repeated observation of breast tumor subtypes in independent gene expression data sets. Proc Natl Acad Sci USA. 2003. 100(14): p. 8418-23,
[0576] 65, Zhao, Y. and R. Simon, BRB-ArrayTools Data Archive for human cancer gene expression: a unique and efficient data sharing resource. Cancer Inform, 2008. 6: p. 9-15.
[0577] 66. Cline, M. S., et al., Exploring TCGA Pan-Cancer data at the UCSC Cancer Genomics Browser. Sci Rep, 2013. 3: p. 2652.
[0578] 67. Goldman, M., et al., The UCSC Cancer Genomics Browser: update 2013. Nucleic Acids Res, 2013, 41(Database issue): p. D949-54.
[0579] 68. Al-Ejeh, F., et al., Treatment of triple-negative breast cancer using anti-EGFR-directed radioimmunotherapy combined with radiosensitizing chemotherapy and PARR inhibitor. J Nucl Med, 2013, 54(6): p. 913-21.
[0580] 69. Diamond, J. R., et al., Predictive biomarkers of sensitivity to the aurora and angiogenic kinase inhibitor ENMD-2076 in preclinical breast cancer models. Clin Cancer Res, 2013. 19(1): p. 291-303,
[0581] 70. Kalous, O., et al., AMG 900, pan-Aurora kinase inhibitor, preferentially inhibits the proliferation of breast cancer cell lines with dysfunctional p53. Breast Cancer Res Treat, 2013. 141(3): p. 397-408,

TABLE 10
The 28-gene signature discovered from a meta-analysis of gene
expression data in breast cancer in Oncomine ™

| Gene | Affymetrix | | |
|---|---|---|---|
| Symbol | probe | Entrez | Gene name |
| ↑ABHD5 | 213935_at | 51099 | abhydrolase domain containing 5; 1- |
| | | | acylglycerol-3-phosphate O-acyltransferase |
| ↑ADORA | 205891_at | 136 | adenosine A2b receptor |
| 2B | | | |
| ↑BCAP31 | 200837_at | 10134 | B-cell receptor-associated protein 31 |
| ↑CA9 | 205199_at | 768 | carbonic anhydrase IX |
| ↑CAMSA | 212711_at | 157922 | calmodulin regulated spectrin-associated |
| P1 | | | protein 1 |
| ↑CARHSP | 218384_at | 23589 | calcium regulated heat stable protein 1, |
| 1 | | | 24 kDa |
| ↑CD55 | 201926_s_at | 1604 | CD55 molecule, decay accelerating factor |
| | | | for complement (Cromer blood group) |
| ↑CETN3 | 209662_at | 1070 | centrin, EF-hand protein, 3 |
| ↑EIF3K | 221494_x_at | 27335 | eukaryotic translation initiation factor 3, |
| | | | subunit K |
| ↑EXOSC7 | 212627_s_at | 23016 | exosome component 7 |
| ↑GNB2L1 | 200651_at | 10399 | guanine nucleotide binding protein (G |
| | | | protein), beta polypeptide 2-like 1 |
| ↑GRHPR | 214864_s_at | 9380 | glyoxylate reductase/hydroxypyruvate |
| | | | reductase |
| ↑GSK3B | 209945_s_at | 2932 | glycogen synthase kinase 3 beta |
| ↑HCFC1R | 218537_at | 54985 | host cell factor C1 regulator 1 (XPO1 |
| 1 | | | dependent) |
| ↑KCNG1 | 214595_at | 3755 | potassium voltage-gated channel, subfamily |
| | | | G, member 1 |
| ↑MAP2K5 | 211370_s_at | 5607 | mitogen-activated protein kinase kinase 5 |
| ↑NDUFC1 | 203478_at | 4717 | NADH dehydrogenase (ubiquinone) 1, |
| | | | subcomplex unknown, 1, 6 kDa |
| ↑PML | 206503_x_at | 5371 | promyelocytic leukemia |
| ↑STAU1 | 208948_s_at | 6780 | staufen, RNA binding protein, homolog 1 |
| | | | (Drosophila) |
| ↑TXN | 216609_at | 7295 | thioredoxin |
| ↑ZNF593 | 204175_at | 51042 | zinc finger protein 593 |
| ↓BTN2A2 | 205298_s_at | 10385 | butpophilin, subfamily 2, member A2 |
| ↓ERC2 | 213938_at | 26059 | ELKS/RAB6-interacting/CAST family |
| | | | member 2 |
| ↓IGH | 211649_x_at | 3492 | immunoglobulin heavy locus |
| ↓ME1 | 211204_at | 4199 | malic enzyme 1, NADP (+)-dependent, |
| | | | cytosolic |
| ↓MTMR7 | 217292_at | 9108 | myotubularin related protein 7 |
| ↓SMPDL3 | 205309_at | 27293 | sphingomyelin phosphodiesterase, acid-like |
| B | | | 3B |
| ↓ZNRD1- | 215985_at | 80862 | ZNRD1 antisense RNA 1 |
| ↓AS1 | | | |

TABLE 11
The TN signature is prognostic in ER−
and BLBC irrespective of systemic therapy.

| | | Untreated | | | Treated | | |
|---|---|---|---|---|---|---|---|
| | | HR | CI 95% | p-value | HR | CI 95% | p-value |
| ER− | RFS | 2.02 | 1.25-3.26 | 3.20E−03 | 2.59 | 1.84-3.60 | 1.70E−08 |
| | DMFS | 4.10 | 1.44-11.7 | 4.20E−03 | 1.89 | 1.04-3.43 | 3.40E−02 |
| | OS | 1.77 | 0.65-4.83 | 0.26 | 3.82 | 1.43-10.18 | 3.90E−03 |
| BLBC | RFS | 2.48 | 1.46-4.21 | 5.10E−04 | 2.88 | 1.94-4.28 | 4.50E−08 |
| | DMFS | 5.54 | 1.66-18.48 | 1.70E−03 | 3.14 | 1.38-7.19 | 4.20E−03 |
| | OS | 2.42 | 0.79-7.47 | 0.11 | 4.89 | 1.65-14.46 | 1.50E−03 |

The 28-gene signature was used as described in FIG. 2 in the online tool KM-plotter but restricting the analysis on ER− or BLBC patients who were untreated systemically or systemically treated. The survival curves for RFS. DMFS and OS are .shown in FIG. 34; only the hazard ratio (HR), the 95% confidence interval (CI 95%) and the log-rank p-value from these curves are reported in the Table.

TABLE 12
The likelihood of pCR in ER-HER2-patients
according to the iBCR score

| | pCR | pCR | Sum |
|---|---|---|---|
| Low Score | 12 (6.6%) | 51 (27.9%) | 63 (34.4%) |
| High Score | 54 (29.5%) | 66 (36.1%) | 120 (65.6%) |
| Total | 66 (36.1%) | 117 (63.1%) | 183 (100%) |

ER-/HER2-patients stratified by low and high iBCR scores from four studies were compared for achieving or not achieving pCR after four chemography regimens: FAC (GSE20271), TFAC (GSE20271 and GSE20194), FEC/TX (GSE42822) and FAC/TX (GSE42822) and FAC/TX (GSE23988)

TABLE 13
Upregulated genes in high iBCR score tumors compared to low iBCR tumors and normal breast tissue

| | | | | | | | Common in high IBCR | | |
|---|---|---|---|---|---|---|---|---|---|
| High iBCR score ER− vs. low iBCR | | | High iBCR score ER+ vs. | | | | score ER−/+ vs. low iBCR | | |
| score ER− and normal breast | | | low iBCR score ER+ and normal breast | | | | score and normal | | |
| ACE2 | HMGB3 | | ACP1 | ENO1 | MCM4 | | ASPM | HN1 | |
| ADM | IL8 | | APOBEC3B | EPRS | MCM6 | RANBP1 | AURKA | KCNK1 | |
| AR | IMPA2 | | ATAD2 | EXOSC4 | MCM7 | RECQL4 | BIRC5 | KIF4A | |
| BNIP3 | KYNU | | AURKB | FADS1 | MRPL13 | RFC2 | BUB1 | MKI67 | |
| C1orf106 | LBP | | BOP1 | FANCI | MRPL15 | RMDN1 | BUB1B | MLF1IP | |
| CALML5 | LRP8 | | CACYBP | GINS2 | MSH6 | RSAD2 | CCNB1 | MMP1 | |
| CBS | MAGEA3 | TDO2 | CALU | GTSE1 | MYBL2 | SHMT2 | CCNB2 | MTFR1 | |
| CCL18 | MAGEA6 | TMEM45A | CCNA2 | H2AFZ | NCAPG | SMC4 | CCNE2 | NDC80 | YKT6 |
| CD24 | ME1 | TMSB15A | CCT2 | HELLS | NDUFS8 | SPAG5 | CDC20 | NEK2 | ZWINT |
| CLIC3 | MMP12 | VEGFA | CDCA3 | HMMR | NUDT21 | SQLE | CDC6 | NUSAP1 | |
| CORO1C | PFKP | VGLL1 | CEBPG | HSPH1 | NUTF2 | STIP1 | CDK1 | PDXK | |
| CP | PHLDA2 | | CKS1B | KIAA0101 | OIP5 | TACC3 | CDKN3 | PHB | |
| CRISP3 | PTPN12 | | CXCL10 | KIF11 | PBK | TBCE | CENPF | PRC1 | |
| DDC | QPRT | | CXCL11 | KIF14 | PCNA | TIMM17A | CKS2 | PTTG1 | |
| ECT2 | S100A7 | | DERL1 | KIF20A | PGK1 | TMPO | CNIH4 | RRM2 | |
| EZH2 | S100A9 | | DHFR | KPNA2 | PLOD2 | TSN | CNTNAP2 | S100A8 | |
| FABP7 | SCD | | DNPH1 | KPNA4 | PRAME | TYMS | DDA1 | S100P | |
| FAR2 | SLC7A5 | | DONSON | LAPTM4B | PSMA7 | UBE2S | DLGAP5 | SPP1 | |
| GABBR2 | SOD2 | | DSCC1 | LMNB1 | PSMC3 | UCK2 | DTL | TK1 | |
| GALNT3 | SOX11 | | EIF4EBP1 | LSM4 | RACGAP1 | WHSC1 | ESRP1 | TOP2A | |
| GMPS | SRD5A1 | | EIF5A | LY6E | RAD21 | ZWILCH | GINS1 | TRIP13 | |
| GPSM2 | ST14 | | EMC8 | MAD2L1 | RAD54B | | HIST1H2BG | UBE2C | |

TABLE 18
Upregulated targets of the downregulated hsa-mir-568 in high iBCR
score ER−/ER+ tumors.

| Fold- | | | | | | |
|---|---|---|---|---|---|---|
| change ↑ | ProbeSet | Symbol | Name | EntrezID | Accession | UGCluster |
| 3.0 | 220085_at | HELLS | helicase, lymphoid- | 3070 | NM_018063 | Hs.655830 |
| | | | specific | | | |
| 2.5 | 201291_s_at | TOP2A | topoisomerase (DNA) II | 7153 | AU159942 | Hs.156346 |
| | | | alpha 170 kDa | | | |
| 2.4 | 203213_at | CDK1 | cyclin-dependent kinase 1 | 983 | AL524035 | Hs.732435 |
| 2.3 | 212009_s_at | STIP1 | stress-induced- | 10963 | AL553320 | Hs.337295 |
| | | | phosphoprotein 1 | | | |
| 1.7 | 203755_at | BUB1B | BUB1 mitotic checkpoint | 701 | NM_001211 | Hs.513645 |
| | | | serine/threonine kinase B | | | |
| 1.6 | 205282_at | LRP8 | low density lipoprotein | 7804 | NM_004631 | Hs.280387 |
| | | | receptor-related protein 8, | | | |
| | | | apolipoprotein e receptor | | | |
| 1.6 | 202697_at | NUDT21 | nudix (nucleoside | 11051 | NM_007006 | Hs.528834 |
| | | | diphosphate linked moiety | | | |
| | | | X)-type motif 21 | | | |
| 1.5 | 209053_s_at | WHSC1 | Wolf-Hirschhorn | 7468 | BE793789 | Hs.113876 |
| | | | syndrome candidate 1 | | | |
| 1.9 | 202134_s_at | WWTR1 | WW domain containing | 25937 | NM_015472 | Hs.594912 |
| | | | transcription regulator 1 | | | |
| 1.9 | 213906_at | MYBL1 | v-myb myeloblastosis | 4603 | AW592266 | Hs.445898 |
| | | | viral oncogene homolog | | | |
| | | | (avian)-like 1 | | | |
| 1.8 | 206348_s_at | PDK3 | pyruvate dehydrogenase | 5165 | NM_005391 | Hs.296031 |
| | | | kinase, isozyme 3 | | | |
| 1.8 | 219927_at | FCF1 | FCF1 small subunit (SSU) | 51077 | NM_015962 | Hs.579828 |
| | | | processome component | | | |
| | | | homolog (S. cerevisiae) | | | |
| 1.8 | 209757_s_at | MYCN | v-myc myelocytomatosis | 4613 | BC002712 | Hs.25960 |
| | | | viral related oncogene, | | | |
| | | | neuroblastoma derived | | | |
| | | | (avian) | | | |
| 1.8 | 217562_at | FAM5C | family with sequence | 339479 | BF589529 | Hs.65765 |
| | | | similarity 5, member C | | | |
| 1.7 | 219875_s_at | DESI2 | desumoylating | 51029 | NM_016076 | Hs.498317 |
| | | | isopeptidase 2 | | | |
| 1.7 | 215305_at | PDGFRA | platelet-derived growth | 5156 | H79306 | Hs.74615 |
| | | | factor receptor, alpha | | | |
| | | | polypeptide | | | |
| 1.7 | 219434_at | TREM1 | triggering receptor | 54210 | NM_018643 | Hs.283022 |
| | | | expressed on myeloid cells 1 | | | |
| 1.7 | 217834_s_at | SYNCRIP | synaptotagmin binding, | 10492 | NM_006372 | Hs.571177 |
| | | | cytoplasmic RNA | | | |
| | | | interacting protein | | | |
| 1.6 | 205646_s_at | PAX6 | paired box 6 | 5080 | NM_000280 | Hs.270303 |
| 1.6 | 205796_at | TCP11L1 | t-complex 11, testis- | 55346 | NM_018393 | Hs.655341 |
| | | | specific-like 1 | | | |
| 1.6 | 222269_at | APOOL | apolipoprotein O-like | 139322 | W87634 | Hs.512181 |
| 1.6 | 219311_at | CEP76 | centrosomal protein | 79959 | NM_024899 | Hs.236940 |
| | | | 76 kDa | | | |
| 1.6 | 214708_at | SNTB1 | syntrophin, beta 1 | 6641 | BG484314 | Rs.46701 |
| | | | (dystrophin-associated | | | |
| | | | protein A1, 59 kDa, basic | | | |
| | | | component 1) | | | |
| 1.6 | 210073_at | ST8SIA1 | ST8 alpha-N-acetyl- | 6489 | L32867 | Hs.408614 |
| | | | neuraminide alpha-2,8- | | | |
| | | | sialyltransferase 1 | | | |
| 1.6 | 205490_x_at | GJB3 | gap junction protein, beta | 2707 | BF060667 | Hs.522561 |
| | | | 3, 31 kDa | | | |
| 1.6 | 219944_at | CLIP4 | CAP-GLY domain | 79745 | NM_024692 | Hs.122927 |
| | | | containing linker protein | | | |
| | | | family, member 4 | | | |
| 1.6 | 206357_at | OPA3 | optic atrophy 3 (autosomal | 80207 | NM_025136 | Hs.466945 |
| | | | recessive, with chorea and | | | |
| | | | spastic paraplegia) | | | |
| 1.6 | 219262_at | SUV39H2 | suppressor of variegation | 79723 | NM_024670 | Hs.554883 |
| | | | 3-9 homolog 2 | | | |
| | | | (Drosophila) | | | |
| 1.5 | 201602_s_at | PPP1R12A | protein phosphatase 1, | 4659 | BE737620 | Hs.49582 |
| | | | regulatory subunit 12A | | | |
| 1.5 | 216008_s_at | ARIH2 | ariadne homolog 2 | 10425 | AV694434 | Hs.633601 |
| | | | (Drosophila) | | | |
| 1.5 | 200671_s_at | SPTBN1 | spectrin, beta, non- | 6711 | N92501 | Hs.503178 |
| | | | erythrocytic 1 | | | |
| 1.5 | 210041_s_at | PGM3 | phosphoglucomutase 3 | 5238 | BC001258 | Hs.661665 |
| 1.5 | 206376_at | SLC6A15 | solute carrier family 6 | 55117 | NM_018057 | Hs.44424 |
| | | | (neutral amino acid | | | |
| | | | transporter), member 15 | | | |

Bolded genes upregulated in high iBCR score ER−/ER+ vs. normal breast.

### Example 3

[0582] The iBCR test described herein was developed from a meta-analysis of gene expression profiles of breast cancer. This test is based on the expression of 43 genes which are prognostic as a signature in breast cancer irrespective of subtype. This test was also found to be prognostic in lung adenocarcinoma. Patients with high iBCR score have much poorer overall survival than patients with low iBCR score.

[0583] In the current study. The Cancer Genome Atlas (TCGA) datasets for several cancer types were investigated for three purposes. First, to determine the differences in at the protein level between high iBCR score breast cancer cases to low iBCR score breast cancer cases. This comparison was also carried out for lung adenocarcinoma. Secondly. to determine whether deregulated proteins/phosphoproteins between high and low iBCR score tumours are prognostic. Finally, the prognostic value of the iBCR mRNA signature and associated protein signature are prognostic in other cancer types profiled by the TCGA.

[0584] As shown in FIGS. 48A&B, comparison of the reverse phase protein array (RPPA) data between ER+ breast cancer cases with high iBCR score and low iBCR score identified several deregulated proteins and phosphoproteins between these two patient subgroups. Similar analysis in ER− breast cancer cases with high iBCR score compared to those with low iBCR score also identified deregulated proteins and phosphoproteins between these two patient subgroups (FIGS. 48C&D). These significantly deregulated proteins and phosphoproteins were then tested for association with overall survival. The upregulation of 9 and down regulation of proteins/phosphoproteins were highly prognostic in breast cancer Importantly, the integration of the iBCR mRNA and protein signatures is the most significant indicator of overall survival of breast cancer patients irrespective of subtypes and in comparison to all known clinicopathological indicators (FIG. 49B).

[0585] Similar analysis in the lung adenocarcinoma TCGA dataset identified proteins/phosphoproteins based on the iBCR mRNA signature which are prognostic as a protein signature (FIG. 50A-C). The integration of the iBCR mRNA/protein signatures were highly prognostic and outperformed the standard clinicopathological indicators in lung adenocarcinoma (FIGS. 50D&E).

[0586] Table 19 summarises the 43 genes at the mRNA level and 2 proteins/phosphoproteins in the iBCR test. The components which were prognostic in breast cancer (FIG. 48 & FIG. 49) and lung adenocarcinoma (FIG. 50) are labelled in Table 19. Next, the association of the mRNA and protein/phosphoprotein levels of the genes in Table 19 with overall survival was tested in other cancer types. The deregulation of mRNA and protein levels of the iBCR test components that associate with overall survival is summarised in Table 19. For each cancer type, the marked components were used as a signature and the stratification of overall survival of kidney renal clear cell carcinoma (KIRC), skin cutaneous melanoma (SKCM), uterine corpus endometrioid carcinoma (UCEC), ovarian adenocarcinoma (OVAC), head and neck squamous cell carcinoma (HNSC), colon/rectal adenocarcinoma (COREAD), lower grade glioma (LGG), bladder urothelial carcinoma (BLCA). lung squamous cell carcinoma (LUSC), kidney renal papillary cell carcinoma (KIRP), cervical squamous cell carcinoma and endocervical adenocarcinoma (CESC), liver hepatocellular carcinoma (LIHC) and pancreatic ductal adenocarcinoma (PDAC). is shown FIGS. 51 to 54.

[0587] In conclusion, the iBCR test including the mRNA and protein components (Table 19) is a highly prognostic test in all cancers tests. This test identifies aggressive human cancers and is enriched for protein-protein interactions (FIG. 55) as well as biological functions related to the hallmarks of cancer (Table 20).

TABLE 20
Enrichment of biological functions related to the hallmarks of cancer
in the iBCR test

| | | | | | P-VALUE |
|---|---|---|---|---|---|
| | | # | | P-VALUE | BONFERR |
| GO ID | TERM | GENES | P-VALUE | FDR | ONI |
| GO: 0009 | response to endogenous stimulus | 22 | 9.17E− | 1.13E− | 1.13E−06 |
| 719 | | | 11 | 06 | |
| GO: 1901 | response to oxygen-containing | 18 | 9.10E− | 2.90E− | 1.13E−03 |
| 700 | compound | | 08 | 04 | |
| GO: 0032 | regulation of cellular protein | 20 | 138E− | 2.90E− | 1.96E−03 |
| 268 | metabolic process | | 07 | 04 | |
| GO: 0035 | intracellular signal transduction | 20 | 1.66E− | 2.90E− | 2.05E−03 |
| 556 | | | 07 | 04 | |
| GO: 0010 | response to grganonitrogen | 14 | 1.80E− | 2.90E− | 2.22E−03 |
| 243 | compound | | 07 | 04 | |
| GO: 0010 | response to organic substance | 24 | 1.82E− | 2.90E− | 2.25E−03 |
| 033 | | | 07 | 04 | |
| GO: 0000 | mitotic cell cycle | 14 | 1.83E− | 2.90E− | 2.27E−03 |
| 278 | | | 07 | 04 | |
| GO: 0051 | regulation of transport | 18 | 1.87E− | 2.90E− | 2.32E−03 |
| 049 | | | 07 | 04 | |
| GO: 0031 | positive regulation of protein | 15 | 2.68E− | 3.41E− | 3.32E−03 |
| 401 | modification process | | 07 | 04 | |
| GO: 0022 | cell cycle process | 16 | 2.86E− | 3.41E− | 3.34E−03 |
| 402 | | | 07 | 04 | |
| GO: 0044 | positive regulation of | 18 | 3.47E− | 3.41E− | 4.30E−03 |
| 093 | function | | 07 | 04 | |
| GO: 0051 | negative regulation of transport | 10 | 3.75E− | 3.41E− | 4.64E−03 |
| 051 | | | 07 | 04 | |
| GO: 0042 | response to drug | 11 | 3.76E− | 3.41E− | 4.66E−03 |
| 493 | | | 07 | 04 | |
| GO: 0007 | cell cycle | 18 | 3.85E− | 3.41E− | 4.77E−03 |
| 049 | | | 07 | 04 | |
| GO: 0009 | response to mechanical stimulus | 8 | 4.36E− | 3.60E− | 5.40E−03 |
| 612 | | | 07 | 04 | |
| GO: 0001 | positive regulation of protein | 13 | 5.76E− | 4.13E− | 7.13E−03 |
| 934 | phosphorylation | | 07 | 04 | |
| GO: 0008 | cell proliferation | 13 | 6.10E− | 4.13E− | 7.55E−03 |
| 283 | | | 07 | 04 | |
| GO: 0009 | positive regulation of signal | 16 | 6.12E− | 4.13E− | 7.57E−03 |
| 967 | transduction | | 07 | 04 | |
| GO: 0051 | positive regulation of cellular | 13 | 6.34E− | 4.13E− | 7.85E−03 |
| 130 | component organization | | 07 | 04 | |
| GO: 0022 | regulation of anatomical structure | 13 | 8.87E− | 5.49E− | 1.10E−02 |
| 603 | morphogenesis | | 07 | 04 | |
| GO: 0072 | divalent inorganic cation | 9 | 9.96E− | 5.70E− | 1.23E−02 |
| 507 | homeostasis | | 07 | 04 | |
| GO: 0023 | positive regulation of signaling | 16 | 1.12E− | 5.70E− | 1.38E−02 |
| 056 | | | 06 | 04 | |
| GO: 0032 | positive regulation of cellular | 15 | 1.13E− | 5.70E− | 1.40E−02 |
| 270 | protein metabolic process | | 06 | 04 | |
| GO: 0048 | gland development | 9 | 1.13E− | 5.70E− | 1.40E−02 |
| 732 | | | 06 | 04 | |
| GO: 0010 | positive regulation of cell | 16 | 1.18E− | 5.70E− | 1.46E−02 |
| 647 | communication | | 06 | 04 | |
| GO: 0051 | regulation of protein metabolic | 20 | 1.20E− | 5.70E− | 1.48E−02 |
| 246 | process | | 06 | 04 | |
| GO: 0051 | regulation of cellular component | 19 | 1.51E− | 6.91E− | 1.87E−02 |
| 128 | organization | | 06 | 04 | |
| GO: 0071 | cellular response to organic | 19 | 1.89E− | 8.34E− | 2.34E−02 |
| 310 | substance | | 06 | 04 | |
| GO: 0042 | positive regulation of | 13 | 2.51E− | 1.07E− | 3.10E−02 |
| 327 | phosphorylation | | 06 | 03 | |
| GO: 1901 | response to nitrogen compound | 13 | 2.90E− | 1.18E− | 3.59E−02 |
| 698 | | | 06 | 03 | |
| GO: 0009 | response to hormone | 13 | 2.95E− | 1.18E− | 3.65E−02 |
| 725 | | | 06 | 03 | |
| GO: 0048 | positive regulation of response to | 18 | 3.30E− | 1.24E− | 4.08E−02 |
| 584 | stimulus | | 06 | 03 | |
| GO: 0042 | regulation of cell proliferation | 17 | 3.36E− | 1.24E− | 4.16E−02 |
| 127 | | | 06 | 03 | |
| GO: 0070 | cellular response to chemical | 21 | 3.40E− | 1.24E− | 4.21E−02 |
| 887 | stimulus | | 06 | 03 | |
| GO: 0010 | posttranscriptional regulation of | 10 | 3.65E− | 1.29E− | 4.52E−02 |
| 608 | gene expression | | 06 | 03 | |
| GO: 0043 | positive regulation of catalytic | 15 | 3.78E− | 1.30E− | 4.68E−02 |
| 085 | activity | | 06 | 03 | |

### Example 4

[0588] The study by Westin et al. (Lancet Oncol, 2014. vol 15(1)) performed gene expression profiling on 18 follicular lymphoma patients before receiving pidilizumab in combination with rituximab. The expression of the genes in the iBCR signature was investigated for association with progression free survival (PFS) in these patients. Twelve genes showed a strong association with PFS (FIG. 5(A) (all the genes that associated with survival belonged to the TN component of the iBCR test). As shown in FIG. 56B, a score calculated based on the iBCR signature was highly predictive of patient survival after pidilizumab+rituximab immunotherapy. The study also profiled eight of the patients 15 days post treatment. The expression of the genes in the signature was compared in these patients before and after treatment. Apart from a trend towards an inversion of the expression profile in general which was most obvious for the one patient who survived (FIG. 56C—patient number 9). one gene (ADORA2B) was significantly different in tumours after treatment compared to that before treatment (FIG. 56D). This gene could be used to confirm response after selection of patients based on the iBCR test.

[0589] The data presented here indicate the iBCR test can be a companion diagnostic for certain immunotherapy which is not surprising since the TN component includes several immune related genes in addition to genes involved in redox reactions and kinases.

### Example 5

[0590] A meta-analysis was performed in Oncomine™ using breast cancer datasets irrespective of subtypes or gene expression array platforms used. The global gene expression profiles of breast tumors that led to metastatic or death event within 5 years were compared to those that did not and the top overexpressed (OE) and underexpressed genes (UE) in these comparisons were selected. The commonly deregulated genes in the primary tumors that led to metastatic and death events (depending on the annotation of each dataset) were then interrogated using the online tool KM-Plotter™ (n>4000 patients with some overlap with the datasets in Oncomine™). Genes which associated with relapse-free survival of breast cancer patients were selected.

[0591] The 860 genes identified from this analysis were then subjected to network analysis using the Ingenuity Pathway Analysis (IPA®) software to identify functional networks within this gene list (see Table 21), FIG. 57 shows the eleven functional networks that contain the 860 genes identified from the meta-analysis where the function of each network is specified and the interactions amongst these networks are depicted with the connecting lines. Genes whose overexpression is associated with poorer survival are marked in red and those whose underexpression is associated with poorer survival are marked in green, Larger circles mark genes with highest association with patient survival in any given network.

[0592] These 860 genes identified from the meta-analysis were then filtered for genes with the highest association with patient survival in each of the eleven functional networks. From this, the selected 133 genes (listed in Table 22) from the eleven functional networks are shown in FIG. 58 (panel A) where the function of each network is displayed. Based on these networks, the 133 genes were classified to six functional metagenes (listed in Table 22) which include: Metabolism, Signalling, Development and Growth, Chromosome segregation/Replication, Immune response and Protein synthesis/Modification metagenes. The association of each of these metagenes with relapse-free survival of breast cancer patients in the KM Plotter dataset is shown in panel B of FIG. 58. Each of these metagenes were scored by calculating the ratio of the expression level (sum or average) of the overexpressed genes in the metagene to the expression level (sum or average) of the underexpressed genes in the metagene. The green lines (with better survival) denote lower score (ratio of the overexpressed to the underexpressed genes) of the metagene whereas the red line (with worse survival) denote high score (ratio of the overexpressed genes to the underexpressed genes).

TABLE 21
860 genes associated with relapse-free survival of breast cancer
patients.

| Carbohydrate/Lipid | | Cell | | | |
|---|---|---|---|---|---|
| Metabolism | | Signalling | Cellualar Development | | |
| ARHGEF3 | ATP6V0A1 | AGBL2 | ABCA8 | KIF5C | ZNF211 |
| ASAH1 | ATP6V1C1 | ARFRP1 | APBB2 | LRIG1 | AP3B1 |
| ASB1 | COX4I1 | ARNT2 | ART4 | MADD | DYNC1LI2 |
| ATP2A2 | DHRS7 | CCR1 | ATHL1 | MAPT | ESRP1 |
| BRD8 | EPCAM | DST | BCL2 | MIER2 | GMPS |
| BTG2 | HN1 | EEF1A1 | BEND5 | MIS18A | GPI |
| BTN2A2 | IDH3A | LUZP1 | CABYR | MR1 | HCCS |
| C1QB | IDH3G | MYBPC1 | CASP10 | N4BP1 | HCFC1R1 |
| CERS6 | LAMTOR2 | PIP | CHPT1 | NEDD4L | KCNG1 |
| CYP2C9 | LAMTOR3 | S1PR1 | CYBRD1 | OGN | NAPG |
| ELOVL2 | MATR3 | SNED1 | ERC2 | PRKCB | NDRG1 |
| ELOVL5 | NPR3 | TAZ | FHL5 | PROL1 | NDUFB6 |
| ERBB4 | NRIP1 | TP63 | GAB1 | RERE | NDUFS6 |
| FLNB | PFKP | ADORA2B | GDNF | SETBP1 | NME1 |
| HIF3A | RAP2A | CMC4 | GLRB | SGCD | OIP5 |
| KIR2DL4 | SLC16A3 | DDX39A | GOLGB1 | SGSM2 | PGAM1 |
| LRP2 | TK1 | GAPDH | GOSR1 | SLC45A2 | PIR |
| LRP8 | VDAC1 | GSK3B | GPR12 | SOD2 | PRRG1 |
| ME1 | RAPGEF6 | HIF1A | HLA-B | SPAG8 | RTCA |
| NCOA1 | RBM38 | HSPA14 | ITM2A | SPG20 | S100A11 |
| NR1H3 | SEC14L2 | LAMA4 | KIAA0247 | SSPN | SMS |
| PBXIP1 | SRSF5 | MAP2K5 | KIAA0430 | SSX2 | TARS |
| PIK3IP1 | STARD13 | | STX18 | XBP1 | TRAK2 |
| PSEN2 | | | TRAK1 | ZC3H14 | |
| | | | TRAPPC10 | ZMYM5 | |

| | |
|---|---|
| | Chromosome |
| Cellular Growth | segregation |

| | | | | |
|---|---|---|---|---|
| ASF1B | SLC11A1 | BCAP31 | AFF1 | AURKB |
| BBS1 | SMARCA2 | BYSL | ATP1A2 | BUB1 |
| CCL13 | SNX1 | CCNA2 | CDC14A | BUB1B |
| CCND2 | SORL1 | CCNE2 | CDC27 | BUB3 |
| CDKN2A | SPDEF | CDC25A | CSPG4 | C20orf24 |
| DIRAS3 | STAT5B | CDC45 | FOXK2 | CCNB1 |
| DIXDC1 | TAOK3 | CDC6 | MAGI1 | CCNB2 |
| DOCK1 | TGOLN2 | CDCA3 | MLLT10 | CDC20 |
| DOK1 | THPO | CDCA8 | MTUS1 | CDK1 |
| EPOR | TIMELESS | CHEK1 | NUP62 | CENPE |
| FLT3 | TNN | DERL1 | NXF1 | CENPF |
| FOSB | TNXB | DHFR | PKMYT1 | CKS1B |
| GGA2 | TYRO3 | E2F8 | RAPGEF2 | CKS2 |
| HAVCR1 | ULK2 | ECT2 | SLC25A12 | FOXM1 |
| IL1RAPL1 | VPS39 | GINS3 | SLC8A1 | KIF2C |
| IL6ST | PIM1 | RAD51 | KIF4A | NUP93 |
| JAK2 | POLD1 | RRM2 | MAD2L1 | NUSAP1 |
| LEPR | PLK4 | SKP2 | MXI1 | NUTF2 |
| LIG1 | PSMD10 | UBE2C | NCAPG | PLK1 |
| LZTFL1 | MCM6 | ULBP2 | NDC80 | PRC1 |
| MTF1 | MELK | WDHD1 | NUP155 | PTTG1 |
| PCM1 | MMP1 | IL1RAP | TPX2 | SPC25 |
| PIK3R4 | MYBL2 | MCM10 | TTK | TACC3 |
| POU6F1 | ORC6 | MCM2 | ZWINT | |
| NF1 | PDAP1 | MCM4 | | |

| DNA Replication/ | | | | | | |
|---|---|---|---|---|---|---|
| Recombination | | Immune system | | | | |
| ALDH3A2 | ADRM1 | ABCA1 | DTX3 | SARM1 | PBK | ACOT7 |
| ATAD5 | BIRC5 | AHSG | DYNC2H1 | SIRT3 | PFDN5 | ANP32E |
| ATF5 | CARHSP1 | ANK3 | EFCAB6 | SMPDL3B | PSMA2 | APOBEC3B |
| BLM | CENPA | APOBEC3A | EFNB3 | SNN | RNASE4 | CAST |
| BRD4 | CENPI | BATF | ERAP1 | TTC28 | RNF141 | CCT5 |
| BRF2 | CENPN | BECN1 | EVL | WFDC2 | S100A9 | CCT6A |
| BTN3A2 | CENPU | BUD31 | FBXO41 | ZMYM6 | SHMT2 | CCT7 |
| CLASP2 | DLGAP5 | C2 | FBXW4 | ZNF516 | SLC7A5 | CD36 |
| FANCA | ERCC6L | C3 | FCGBP | IGHG3 | SOX11 | CD55 |
| FBLN1 | EXO1 | CACNA1D | FCGR1A | IGHM | TBPL1 | CDK8 |
| KIF18B | FANCI | CARD10 | FCGR1B | IGK | TCP1 | CHD1 |
| NPR2 | H2AFX | CD163 | FOS | IGKC | TOPORS | CXCL8 |
| PLXNA3 | H2AFZ | CD1A | FRZB | IGSF9B | TREM1 | DHCR7 |
| PSMD2 | IMPDH2 | CD1B | GAS7 | IL16 | TXN | DSCC1 |
| STC2 | MAPRE1 | CD1C | GCH1 | KCNMA1 | TXNRD1 | ELF3 |
| TCF3 | MSH6 | CD22 | GLI3 | KIF13B | WNT5A | GEMIN4 |
| TCF7L1 | PML | CD68 | GPRASP1 | KL | GM2A | |
| TCF7L2 | POMP | CD80 | GREB1 | LAD1 | GPSM2 | |
| TXNIP | PSMB4 | CDK5R1 | IGH | LAT | GSPT1 | |
| RYBP | PSMB5 | CFB | IGHG1 | LFNG | HMGB3 | |
| TOP2A | PSMB7 | CHL1 | NBPF10 | MED12 | HMMR | |
| UBE2A | PSMD14 | CIITA | NUMA1 | MOG | HNRNPAB | |
| UBE2B | PSMD3 | CR1 | PDE6B | MX2 | HPSE | |
| PSMD7 | | CRP | PGR | MCCC2 | HRASLS | |
| | | CST3 | PHLDA2 | MRPL12 | IDH2 | |
| | | CXCL14 | PPY | NAE1 | KIAA0101 | |
| | | CXCR4 | RLN2 | NXN | LGALS1 | |

Metabolic Disease

| | | | | | |
|---|---|---|---|---|---|
| AASS | ENOSF1 | MMRN2 | SESN1 | CALM1 | NME1- |
| ABCC8 | FAM105A | MPP2 | SFI1 | CAMSAP1 | NME2 |
| ACAP2 | FAM117A | MYO19 | SLC35A2 | CETN3 | PARPBP |
| ACSF2 | FAM120A | N4BP2L1 | SLC6A5 | CFAP20 | PGK1 |
| AHCYL1 | FAM129A | NBEA | SLCO1A2 | CMC2 | PLCH1 |
| ALDH1A2 | FAM49B | NCAPD3 | SPATA6 | CNOT8 | RAB22A |
| ANKHD1- | FAM86B1 | NDUFAF5 | TBRG4 | COG8 | SFXN1 |
| EIF4EBP3 | FCER1A | NFATC1 | TCTN1 | COQ9 | SHMT1 |
| ANKRD11 | GCC2 | NOP2 | TLDC1 | CORO1C | SMC4 |
| APOM | GLTSCR2 | NSUN5 | TLE4 | DKC1 | SNRPA1 |
| ARL3 | GTPBP2 | OSBPL1A | TMC6 | DONSON | STIL |
| BIN3 | HAUS5 | PADI1 | TSKS | EMC8 | SUGCT |
| BSDC1 | HDC | PDK3 | TSR1 | ENY2 | TMEM208 |
| BTD | HOOK2 | PHF8 | TTC12 | FKBP3 | TPD52L2 |
| BTN2A1 | HOXA4 | PIEZO1 | VAMP1 | GGH | TRIP13 |
| BTN3A3 | HPN | PPIL2 | VAMP2 | GLT8D1 | WDR41 |
| C12orf49 | HS3ST1 | PPP3R1 | WDR19 | GRHPR | YIPF3 |
| CALR | HTN1 | PSD4 | ZCCHC24 | GTSE1 | ZNF593 |
| CAMK2B | HYI | PUM1 | ZFP36L2 | HELLS | |
| CAMK4 | INADL | RAB30 | ZMYND10 | HJURP | |
| CASC1 | ITM2C | RAB6B | ZNF22 | KCMF1 | |
| CCDC176 | ITPR1 | RAI2 | ZNF506 | KDM5A | |
| CCDC25 | IVD | RALGAPA1 | ZNF778 | KIF14 | |
| CD1E | KIAA0930 | RAPGEF3 | ZSCAN32 | MRPL18 | |
| CNTRL | KIAA1549L | RCAN1 | ZZEF1 | MRPL9 | |
| CPSF7 | LAP3 | RPS6KA6 | ACOT13 | MRPS17 | |
| CROCC | ME3 | SERHL2 | B9D2 | NFATC3 | |
| CTDSPL | | | | | |

| | |
|---|---|
| | Post-Translational |
| Nucleic Acid Metabolism | Modification |

| | | | | |
|---|---|---|---|---|
| ABAT | RECQL5 | HEATR3 | ABCB1 | RTN1 |
| AHNAK | RUNX1 | KIF18A | ACAN | TENC1 |
| ALPK1 | SCUBE2 | KIF23 | AMN | TGFB3 |
| BCAT2 | SF3B1 | KPNA2 | COL4A6 | TGFBR3 |
| BMP8A | SF3B2 | PAPOLA | CSF1 | ADAM9 |
| BTRC | SLC27A2 | RAD51AP1 | DDX11 | ADM |
| CACNA1G | SLC6A2 | RFC4 | FGFR1 | CALB2 |
| CALCOCO1 | SMARCC2 | RPN1 | FGFR2 | CTSV |
| CBX7 | SNRNP70 | SEC61G | GSTM1 | DBNDD1 |
| COL14A1 | SRSF7 | SF3B3 | GUSB | FAM96B |
| DCLRE1C | SSX3 | SMAD5 | IGF1 | IGF1R |
| ESR1 | SYMPK | SMYD2 | LRRN3 | KIF11 |
| FBXO4 | SYNC | SPAG5 | MAP3K12 | KIF210A |
| FMO5 | TMC5 | SRPK1 | MST1 | LAPTM4B |
| GART | USP19 | SUB1 | MYB | MMP15 |
| H6PD | USP4 | TAF11 | NTRK2 | RAB2A |
| JADE2 | WSB1 | TAF2 | RBM5 | SERPINH1 |
| KIRG1 | ACTR3 | TCEB1 | RLN1 | TCEB2 |
| KMT2A | AQP9 | USP10 | | |
| MAFG | ARPC4 | VPS28 | | |
| MAPRE2 | ATAD2 | WWTR1 | | |
| MYOF | AURKA | XPOT | | |
| NOVA1 | CA9 | | | |
| NSMCE4A | CDK7 | | | |
| POLE2 | CEP55 | | | |
| PTGDS | CFDP1 | | | |
| PTGER3 | DSN1 | | | |

| Protein Synthesis/Modification | | | | | Multiple networks | |
|---|---|---|---|---|---|---|
| ACAA1 | MTMR3 | RPS28 | EIF6 | SLC25A5 | ABHD14A | RPS4XP2 |
| ACKR1 | MTMR7 | RPS4X | EPRS | SLC52A2 | C1orf21 | RPS4XP3 |
| ACSL6 | MXD4 | RPS6 | ETFA | SPIN1 | C3orf18 | SLC35D2 |
| ADRA2A | MYOZ3 | SAMD4A | EXOSC4 | SQLE | C4A | SLC38A7 |
| AGTR2 | MYT1 | SIRPA | EXOSC7 | STAU1 | CCDC30 | SPATA6L |
| AUNIP | NME5 | SLC16A5 | GNB2L1 | SYNCRIP | CFAP69 | SSX7 |
| C2CD2 | NMT1 | SLC4A7 | GPR56 | TKT | CLUL1 | TNXA |
| CCDC170 | NPY1R | SLC7A6 | GTPBP4 | TMEM194A | FCGR3B | TPSAB1 |
| CELSR2 | NPY5R | SORBS1 | ILF2 | TUBA1B | GUSBP11 | TPSB2 |
| CHAD | OSGEPL1 | SQSTM1 | KARS | UBE2V1 | IGHD | UGT1A8 |
| CREBL2 | P2RY4 | SRPK3 | LAMA3 | YWHAZ | IGHJ3 | WDR78 |
| CSDE1 | P2RY6 | THEMIS2 | LRPPRC | | IGHV3-20 | ZNF710 |
| CX3CR1 | PAPPA | TTLL1 | NDUFC1 | | IGHV3-23 | ZNRD1- |
| CYR61 | PDCD2 | ZNF395 | NELFE | | IGLJ3 | AS1 |
| DDX3X | PDCD4 | ABHD5 | NOP56 | | KIAA0040 | BOLA2 |
| DHTKD1 | PER3 | ADRBK2 | QARS | | KIR2DL1 | MRPL23 |
| EGOT | PNPLA4 | AIMP1 | RACGAP1 | | KIR2DL3 | |
| EIF1 | PTCD3 | ALG3 | RAD21 | | LINC01260 | |
| EML2 | PTPN1 | BRIX1 | RAD23B | | LOC389906 | |
| EPHX2 | PTPRO | CDKN3 | RC3H2 | | LRRC48 | |
| FAM134A | PTPRT | CHAF1A | RPL14 | | NBPF8 | |
| FRS3 | PURA | EIF3A | RPL15 | | NSUN7 | |
| ICA1 | RAMP2 | EIF3B | RPL29 | | PGAP2 | |
| LAMA2 | RGS5 | EIF3K | RPS9 | | PGPEP1 | |
| LPAR2 | RHBDD3 | EIF4B | RPSA | | RBMY1J | |
| LZTS1 | RPL10 | EIF4E | SFPQ | | RBMY2MP | |
| MAOA | RPL22 | EIF4G1 | SHCBP1 | | RGPD6 | |

[0593] Genes whose overexpression is associated with poorer survival are in bold and those whose underexpression is associated with poorer survival are underlined

TABLE 22
133 genes associated with relapse-free survival of breast cancer
patients.

| ID | SEQ ID NO: | Network | Metagene |
|---|---|---|---|
| BRD8 | 1 | Carbohydrate/Lipid Metabolism | Metabolism |
| BTG2 | 2 | Carbohydrate/Lipid Metabolism | |
| BTN2A2 | 3 | Carbohydrate/Lipid Metabolism | |
| KIR2DL4 | 4 | Carbohydrate/Lipid Metabolism | |
| ME1 | 5 | Carbohydrate/Lipid Metabolism | |
| PIK3IP1 | 6 | Carbohydrate/Lipid Metabolism | |
| SEC14L2 | 7 | Carbohydrate/Lipid Metabolism | |
| PSEN2 | 8 | Carbohydrate/Lipid Metabolism | |
| FLNB | 9 | Carbohydrate/Lipid Metabolism | |
| ACSF2 | 10 | Metabolic Disease | |
| APOM | 11 | Metabolic Disease | |
| BIN3 | 12 | Metabolic Disease | |
| CALR | 13 | Metabolic Disease | |
| CAMK4 | 14 | Metabolic Disease | |
| GLTSCR2 | 15 | Metabolic Disease | |
| ITM2C | 16 | Metabolic Disease | |
| NOP2 | 17 | Metabolic Disease | |
| NSUN5 | 18 | Metabolic Disease | |
| ZMYND10 | 19 | Metabolic Disease | |
| ABAT | 20 | Nucleic Acid Metabolism | |
| BCAT2 | 21 | Nucleic Acid Metabolism | |
| SCUBE2 | 22 | Nucleic Acid Metabolism | |
| SF3B1 | 23 | Nucleic Acid Metabolism | |
| RUNX1 | 24 | Nucleic Acid Metabolism | |
| ZNRD1- | 25 | Nucleic Acid Metabolism | |
| AS1 | | | |
| ATP6V1C1 | 26 | Carbohydrate/Lipid Metabolism | |
| RAP2A | 27 | Carbohydrate/Lipid Metabolism | |
| CALM1 | 28 | Metabolic Disease | |
| CAMSAP1 | 29 | Metabolic Disease | |
| CETN3 | 30 | Metabolic Disease | |
| COG8 | 31 | Metabolic Disease | |
| GRHPR | 32 | Metabolic Disease | |
| HELLS | 33 | Metabolic Disease | |
| KDM5A | 34 | Metabolic Disease | |
| PGK1 | 35 | Metabolic Disease | |
| PLCH1 | 36 | Metabolic Disease | |
| ZNF593 | 37 | Metabolic Disease | |
| CA9 | 38 | Nucleic Acid Metabolism | |
| CEP55 | 39 | Nucleic Acid Metabolism | |
| CFDP1 | 40 | Nucleic Acid Metabolism | |
| RFC4 | 41 | Nucleic Acid Metabolism | |
| TAF2 | 42 | Nucleic Acid Metabolism | |
| VPS28 | 43 | Nucleic Acid Metabolism | |
| SF3B3 | 44 | Nucleic Acid Metabolism | |
| LRRC48 | 45 | Cell Signaling | Signaling |
| ARNT2 | 46 | Cell Signaling | |
| MYBPC1 | 47 | Cell Signaling | |
| ADORA2B | 48 | Cell Signaling | |
| GSK3B | 49 | Cell Signaling | |
| LAMA4 | 50 | Cell Signaling | |
| MAP2K5 | 51 | Cell Signaling | |
| BCL2 | 52 | Cellular Development | Development&Growth |
| CHPT1 | 53 | Cellular Development | |
| ERC2 | 54 | Cellular Development | |
| ITM2A | 55 | Cellular Development | |
| LRIG1 | 56 | Cellular Development | |
| MAPT | 57 | Cellular Development | |
| PRKCB | 58 | Cellular Development | |
| RERE | 59 | Cellular Development | |
| ABHD14A | 60 | Cellular Development | |
| FLT3 | 61 | Cellular Growth | |
| SLC11A1 | 62 | Cellular Growth | |
| TNN | 63 | Cellular Growth | |
| GPI | 64 | Cellular Development | |
| HCFC1R1 | 65 | Cellular Development | |
| KCNG1 | 66 | Cellular Development | |
| PIR | 67 | Cellular Development | |
| BCAP31 | 68 | Cellular Growth | |
| MCM10 | 69 | Cellular Growth | |
| MELK | 70 | Cellular Growth | |
| ULBP2 | 71 | Cellular Growth | |
| BRD4 | 72 | DNA | Chromosome |
| | | Replication/Recombination | segregation/Replication |
| STC2 | 73 | DNA | |
| | | Replication/Recombination | |
| FOXM1 | 74 | Chromosome segregation | |
| KIF2C | 75 | Chromosome segregation | |
| NUP155 | 76 | Chromosome segregation | |
| TPX2 | 77 | Chromosome segregation | |
| TTK | 78 | Chromosome segregation | |
| CARHSP1 | 79 | DNA | |
| | | Replication/Recombination | |
| CENPA | 80 | DNA | |
| | | Replication/Recombination | |
| CENPN | 81 | DNA | |
| | | Replication/Recombination | |
| EXO1 | 82 | DNA | |
| | | Replication/Recombination | |
| MAPRE1 | 83 | DNA | |
| | | Replication/Recombination | |
| PML | 84 | DNA | |
| | | Replication/Recombination | |
| APOBEC3A | 65 | Immune system | Immune response |
| BATF | 86 | Immune system | |
| CD1A | 87 | Immune system | |
| CD1B | 88 | Immune system | |
| CD1C | 89 | Immune system | |
| CD1E | 90 | Immune system | |
| CFB | 91 | Immune system | |
| CXCR4 | 92 | Immune system | |
| EVL | 93 | Immune system | |
| FBXW4 | 94 | Immune system | |
| HLA-B | 95 | Immune system | |
| IGH | 96 | Immune system | |
| KIR2DL3 | 97 | Immune system | |
| SMPDL3B | 98 | Immune system | |
| ACOT7 | 99 | Immune system | |
| CD36 | 100 | Immune system | |
| CD55 | 101 | Immune system | |
| GEMIN4 | 102 | Immune system | |
| NAE1 | 103 | Immune system | |
| SHMT2 | 104 | Immune system | |
| TCP1 | 105 | Immune system | |
| TXN | 106 | Immune system | |
| TXNRD1 | 107 | Immune system | |
| ABCB1 | 108 | Post-Translational Modification | Protein synthesis/Modification |
| MYB | 109 | Post-Translational Modification | |
| RLN1 | 110 | Post-Translational Modification | |
| ACAA1 | 111 | Protein Synthesis/Modification | |
| CHAD | 112 | Protein Synthesis/Modification | |
| MTMR7 | 113 | Protein Synthesis/Modification | |
| PDCD4 | 114 | Protein Synthesis/Modification | |
| RPL10 | 115 | Protein Synthesis/Modification | |
| RPS28 | 116 | Protein Synthesis/Modification | |
| RPS4X | 117 | Protein Synthesis/Modification | |
| RPS6 | 118 | Protein Synthesis/Modification | |
| SORBS1 | 119 | Protein Synthesis/Modification | |
| SRPK3 | 120 | Protein Synthesis/Modification | |
| RPL22 | 121 | Protein Synthesis/Modification | |
| RPS4XP3 | 122 | Protein Synthesis/Modification | |
| ADM | 123 | Post-Translational Modification | |
| ABHD5 | 124 | Protein Synthesis/Modification | |
| CHAF1A | 125 | Protein Synthesis/Modification | |
| EIF3K | 126 | Protein Synthesis/Modification | |
| EIF4B | 127 | Protein Synthesis/Modification | |
| EXOSC7 | 128 | Protein Synthesis/Modification | |
| GNB2L1 | 129 | Protein Synthesis/Modification | |
| LAMA3 | 130 | Protein Synthesis/Modification | |
| NDUFC1 | 131 | Protein Synthesis/Modification | |
| STAU1 | 132 | Protein Synthesis/Modification | |
| SYNCRIP | 133 | Protein Synthesis/Modification | |

[0594] Genes whose overexpression is associated with poorer survival are in bold and those whose underexpression is associated with poorer survival are underlined

### Example 6

[0595] The preceding example identified 133 genes, associated with 12 oncogenic functions, the expression of which is strongly associated with cancer aggressiveness and clinical outcome (Table 22). The expression of genes from this list was investigated for association with survival in (i) follicular lymphoma patients before receiving pidilizurnab in combination with rituximab (Westin et al. Lancet Oncol, 2014, vol 15(1)) (ii) colorectal cancer patients treated with cetuximab (GSE5851); (iii) triple negative breast cancer patients treated with cetuximab and cisplatin (GSE23428); (iv) lung cancer patients treated with. erlotinib (GSE33072): and (v) lung cancer patients treated with sorafenib (GSE33072). This analysis identified new sets of genes, with partial overlap to the iBCR signature, the expression of which was highly associated with survival in the different treatment groups (Table 23). Scores for each patient group, which were calculated based on these gene signatures were shown to be highly predictive of survival in these patient groups (pidilizumab+rituximab: FIG. 56E; all other treatments FIG. 59).

TABLE 23
iBCR gene signatures associated with survival in patients receiving
anticancer therapy.

| Follicular | | | | |
|---|---|---|---|---|
| Lymphoma | | | Colorectal | Triple negative |
| (pidilizumab + | Lung Cancer | Lung Cancer | cancer | breast cancer |
| rituximab) | (erlotinib) | (sorafenib) | (cetuximab) | (cetuximab) |
| APOBEC3A | CD1C | NOP2 | ARNT2 | SF3B3 |
| BCL2 | CD1E | CALR | NDUFC1 | CETN3 |
| BTN2A2 | CD1B | MAPRE1 | BCL2 | SYNCRIP |
| CAMK4 | KDM5A | KCNG1 | ABHD14A | TAF2 |
| FBXW4 | BATF | PGK1 | EVL | CENPN |
| PSEN2 | EVL | SRPK3 | ULBP2 | ATP6V1C1 |
| MYB | PRKCB | RERE | BIN3 | CD55 |
| ADORA2B | HCFC1R1 | ADM | MAPRE1 | ADORA2B |
| CD36 | CARHSP1 | LAMA3 | BRD4 | RPL22 |
| KCNG1 | CHAD | KIR2DL4 | STAU1 | ABAT |
| LAMA3 | KIR2DL4 | ULBP2 | TAF2 | BTN2A2 |
| MAP2K5 | ABHD5 | LAMA4 | GSK3B | CD1B |
| NAE1 | ABHD14A | CA9 | PDCD4 | ITM2A |
| PGK1 | ACAA1 | BCAP31 | KCNG1 | BCL2 |
| STAU1 | SRPK3 | SCUBE2 | ZNRD1-AS1 | CXCR4 |
| CFDP1 | CFB | CHPT1 | EIF4B | ARNT2 |
| SF3B3 | NAE1 | CD1C | HELLS | |
| | GSK3B | BTG2 | | |
| | TAF2 | ADORA2B | | |
| | | BCL2 | | |

[0596] Genes whose underexpression is associated with a response to treatment are in bold and those whose overexpression is associated with a response to treatment are underlined

1. A method of determining the aggressiveness of a cancer in a mammal, said method including the step of comparing an expression level of one or a plurality of overexpressed genes and/or an expression level of one or a plurality of underexpressed genes in one or a plurality of cancer cells, tissues or organs of the mammal, wherein the overexpressed genes and the underexpressed genes are from one or a plurality of metagenes selected from the group consisting of a Carbohydrate/Lipid Metabolism metagene, a Cell Signalling metagene, a Cellular Development metagene, a Cellular Growth metagene, a Chromosome Segregation metagene, a DNA Replication/Recombination metagene, an Immune System metagene, a Metabolic Disease metagene, a Nucleic Acid Metabolism metagene, a Post-Translational Modification metagene, a Protein Synthesis/Modification metagene and a Multiple Networks metagene, wherein: a higher relative expression level of the one or plurality of overexpressed genes compared to the one or plurality of underexpressed genes indicates or correlates with higher aggressiveness of the cancer; and/or a lower relative expression level of the one or plurality of overexpressed genes compared to the one or plurality of underexpressed genes indicates or correlates with lower aggressiveness of the cancer compared to a mammal having a higher expression level.

2. A method of determining a cancer prognosis for a mammal, said method including the step of comparing an expression level of one or a plurality of overexpressed genes and/or an expression level of one or a plurality of underexpressed genes in one or a plurality of cancer cells, tissues or organs of the mammal, wherein the overexpressed genes and the underexpressed genes are from one or a plurality of metagenes selected from the group consisting of a Carbohydrate/Lipid Metabolism metagene, a Cell Signalling metagene, a Cellular Development metagene, a Cellular Growth metagene, a Chromosome Segregation metagene, a DNA Replication/Recombination metagene, an Immune System metagene, a Metabolic Disease metagene, a Nucleic Acid Metabolism metagene, a Post-Translational Modification metagene, a Protein Synthesis/Modification metagene and a Multiple Networks metagene, wherein: a higher relative expression level of the one or plurality of overexpressed genes compared to the one or plurality of underexpressed genes indicates or correlates with a less favourable cancer prognosis; and/or a lower relative expression level of the one or plurality of overexpressed genes compared to the one or plurality of underexpressed genes indicates or correlates with a more favourable cancer prognosis.

3. The method of claim 1, wherein the Carbohydrate/Lipid Metabolism metagene, the Cell Signalling metagene, the Cellular Development metagene, the Cellular Growth metagene, the Chromosome Segregation metagene, the DNA Replication/Recombination metagene, the Immune System metagene, the Metabolic Disease metagene, the Nucleic Acid Metabolism metagene, the Post-Translational Modification metagene, the Protein Synthesis/Modification metagene and/or the Multiple Networks metagene comprise one or a plurality of genes listed in Table 21.

4. The method claim 2, wherein the Carbohydrate/Lipid Metabolism metagene, the Cell Signalling metagene, the Cellular Development metagene, the Cellular Growth metagene, the Chromosome Segregation metagene, the DNA Replication/Recombination metagene, the Immune System metagene, the Metabolic Disease metagene, the Nucleic Acid Metabolism metagene, the Post-Translational Modification metagene, the Protein Synthesis/Modification metagene and/or the Multiple Networks metagene comprise one or a plurality of genes listed in Table 21.

5. A method of determining the aggressiveness of a cancer in a mammal, said method including the step of comparing an expression level of one or a plurality of overexpressed genes and/or an expression level of one or a plurality of underexpressed genes in one or a plurality of cancer cells, tissues or organs of the mammal, wherein the overexpressed genes and the underexpressed genes are from one or a plurality of metagenes selected from the group consisting of a Metabolism metagene, a Signalling metagene, a Development and Growth metagene, a Chromosome Segregation/Replication metagene, an Immune Response metagene and a Protein Synthesis/Modification metagene, wherein: a higher relative expression level of the one or plurality of overexpressed genes compared to the one or plurality of underexpressed genes indicates or correlates with higher aggressiveness of the cancer; and/or a lower relative expression level of the one or plurality of overexpressed genes compared to the one or plurality of underexpressed genes indicates or correlates with lower aggressiveness of the cancer compared to a mammal having a higher expression level.

6. A method of determining a cancer prognosis for a mammal, said method including the step of comparing an expression level of one or a plurality of overexpressed genes and/or an expression level of one or a plurality of underexpressed genes in one or a plurality of cancer cells, tissues or organs of the mammal, wherein the overexpressed genes and the underexpressed genes are from one or a plurality of metagenes selected from the group consisting of a Metabolism metagene, a Signalling metagene, a Development and Growth metagene, a Chromosome Segregation/Replication metagene, an Immune Response metagene and a Protein Synthesis/Modification metagene, wherein: a higher relative expression level of the one or plurality of overexpressed genes compared to the one or plurality of underexpressed genes indicates or correlates with a less favourable cancer prognosis; and/or a lower relative expression level of the one or plurality of overexpressed genes compared to the one or plurality of underexpressed genes indicates or correlates with a more favourable cancer prognosis.

7. The method of claim 6, wherein the Metabolism metagene, the Signalling metagene, the Development and Growth metagene, the Chromosome Segregation/Replication metagene, the Immune Response metagene and/or the Protein Synthesis/Modification metagene comprise one or more genes listed in Table 22.

8. The method of claim 5, wherein the Metabolism metagene, the Signalling metagene, the Development and Growth metagene, the Chromosome Segregation/Replication metagene, the Immune Response metagene and/or the Protein Synthesis/Modification metagene comprise one or more genes listed in Table 22.

9-13. (canceled)

14. A method of determining the aggressiveness of a cancer in a mammal, said method including the step of comparing an expression level of one or a plurality of overexpressed genes associated with chromosomal instability and/or an expression level of one or a plurality of underexpressed genes associated with estrogen receptor signalling in one or a plurality of cancer cells, tissues or organs of the mammal, wherein: a higher relative expression level of the one or plurality of overexpressed genes associated with chromosomal instability compared to the one or plurality of underexpressed genes associated with estrogen receptor signalling indicates or correlates with higher aggressiveness of the cancer; and/or a lower relative expression level of the one or plurality of overexpressed genes associated with chromosomal instability compared to the one or plurality of underexpressed genes associated with estrogen receptor signalling indicates or correlates with lower aggressiveness of the cancer compared to a mammal having a higher expression level.

15. A method of determining a cancer prognosis for a mammal, said method including the step of comparing an expression level of one or a plurality of overexpressed genes associated with chromosomal instability and/or an expression level of one or a plurality of underexpressed genes associated with estrogen receptor signalling in one or a plurality of cancer cells, tissues or organs of the mammal, wherein: a higher relative expression level of the one or plurality of overexpressed genes associated with chromosomal instability compared to the one or plurality of underexpressed genes associated with estrogen receptor signalling indicates or correlates with a less favourable cancer prognosis; and/or a lower relative expression level of the one or plurality of overexpressed genes associated with chromosomal instability compared to the one or plurality of underexpressed genes associated with estrogen receptor signalling indicates or correlates with a more favourable cancer prognosis.

16-23. (canceled)

24. The method of claim 14, wherein the genes associated with chromosomal instability are of a CIN metagene.

25. The method of claim 24, wherein the CIN metagene comprises a plurality of genes listed in Table 4.

26. The method of claim 15, wherein the genes associated with chromosomal instability are of a CIN metagene.

27. The method of claim 26, wherein the CIN metagene coprises a plurality of genes listed in Table 4.

28. The method of claim 14, wherein the genes associated with estrogen receptor signalling are of an ER metagene.

29. The method of claim 28, wherein the genes are selected from the group consisting of: BTG2, PIK3IP1, SEC14L2, FLNB, ACSF2, APOM, BIN3, GLTSCR2, ZMYND10, ABAT, BCAT2, SCUBE2, RUNX1, LRRC48, MYBPC1, BCL2, CHPT1, ITM2A, LRIG1, MAPT, PRKCB, RERE, ABHD14A, FLT3, TNN, STC2, BATF, CD1E, CFB, EVL, FBXW4, ABCB1, ACAA1, CHAD, PDCD4, RPL10, RPS28, RPS4X, RPS6, SORBS1, RPL22 and RPS4XP3.

30. The method of claim 15, wherein the genes associated with estrogen receptor signalling are of an ER metagene.

31. The method claim 30, wherein the genes are selected from the group consisting of: BTG2, PIK3IP1, SEC14L2, FLNB, ACSF2, APOM, BIN3, GLTSCR2, ZMYND10, ABAT, BCAT2, SCUBE2, RUNX1, LRRC48, MYBPC1, BCL2, CHPT1, ITM2A, LRIG1, MAPT, PRKCB, RERE, ABHD14A, FLT3, TNN, STC2, BATF, CD1E, CFB, EVL, FBXW4, ABCB1, ACAA1, CHAD, PDCD4, RPL10, RPS28, RPS4X, RPS6, SORBS1, RPL22 and RPS4XP3.

32-37. (canceled)

38. A method of determining the aggressiveness of a cancer in a mammal, said method including the step of comparing an expression level of one or a plurality of overexpressed genes selected from the group consisting of CAMSAP1, CETN3, GRHPR, ZNF593, CA9, CFDP1, VPS28, ADORA2B, GSK3B, LAMA4, MAP2K5, HCFC1R1, KCNG1, BCAP31, ULBP2, CARHSP1, PML, CD36, CD55, GEMIN4, TXN, ABHD5, EIF3K, EIF4B, EXOSC7, GNB2L1, LAMA3, NDUFC1 and STAU1, and/or an expression level of one or a plurality of underexpressed genes selected from the group consisting of BRD8, BTN2A2. KIR2DL4. ME1, PSEN2, CALR, CAMK4, ITM2C, NOP2, NSUN5, SF3B1, ZNRD1-AS1, ARNT2, ERC2, SLC11A1, BRD4, APOBEC3A, CD1A, CD1B, CD1C, CXCR4, HLA-B, IGH, KIR2DL3, SMPDL3B, MYB, RLN1, MTMR7, SORBS1 and SRPK3, in one or a plurality of cancer cells, tissues or organs of the mammal, wherein: a higher relative expression level of the one or plurality of overexpressed genes compared to the one or plurality of underexpressed genes indicates or correlates with higher aggressiveness of the cancer; and/or a lower relative expression level of the one or plurality of overexpressed genes compared to the one or plurality of underexpressed genes indicates or correlates with lower aggressiveness of the cancer compared to a mammal having a higher expression level.

39. A method of determining a cancer prognosis for a mammal, said method including the step of comparing an expression level of one or a plurality of overexpressed genes selected from the group consisting of CAMSAP1, CETN3, GRHPR, ZNF593, CA9, CFDP1, VPS28, ADORA2B, GSK3B, LAMA4, MAP2K5, HCFC1R1, KCNG1, BCAP31, ULBP2, CARHSP1, PML, CD36, CD55, GEMIN4, TXN, ABHD5, EIF3K, EIF4B, EXOSC7, GNB2L1, LAMA3, NDUFC1 and STAU1, and/or an expression level of one or a plurality of underexpressed genes selected from the group consisting of BRD8, BTN2A2. KIR2DL4. ME1, PSEN2, CALR, CAMK4, ITM2C, NOP2, NSUN5, SF3B1, ZNRD1-AS1, ARNT2, ERC2, SLC11A1, BRD4, APOBEC3A, CD1A, CD1B, CD1C, CXCR4, HLA-B, IGH, KIR2DL3, SMPDL3B, MYB, RLN1, MTMR7, SORBS1 and SRPK3, in one or a plurality of cancer cells, tissues or organs of the mammal, wherein: a higher relative expression level of the one or plurality of overexpressed genes compared to the one or plurality of underexpressed genes indicates or correlates with a less favourable cancer prognosis; and/or a lower relative expression level of the one or plurality of overexpressed genes compared to the one or plurality of underexpressed genes indicates or correlates with a more favourable cancer prognosis compared to a mammal having a higher expression level.

40-52. (canceled)

53. A method of determining the aggressiveness of a cancer in a mammal, said method including the step of comparing an expression level of one or a plurality of overexpressed proteins selected from the group consisting of DVL3, PAI-1, VEGFR2, INPP4B, EIF4EBP1, EGFR, Ku80, HER3, SMAD1, GATA3, ITGA2, AKT1, NFKB1, HER2, ASNS and COL6A1, and/or an expression level of one or a plurality of underexpressed proteins selected from the group consisting of VEGFR2, HER3, ASNS, MAPK9, ESR1, YWHAE, RAD50, PGR, COL6A1, PEA15 and RPS6, in one or a plurality of cancer cells, tissues or organs of the mammal, wherein: a higher relative expression level of the one or plurality of overexpressed proteins compared to the one or plurality of underexpressed proteins indicates or correlates with higher aggressiveness of the cancer; and/or a lower relative expression level of the one or plurality of overexpressed proteins compared to the one or plurality of underexpressed proteins indicates or correlates with lower aggressiveness of the cancer compared to a mammal having a higher expression level.

54. A method of determining a cancer prognosis for a mammal, said method including the step of comparing an expression level of one or a plurality of overexpressed proteins selected from the group consisting of DVL3, PAI-1, VEGFR2, INPP4B, EIF4EBP1, EGFR, Ku80, HER3, SMAD1, GATA3, ITGA2, AKT1, NFKB1, HER2, ASNS and COL6A1, and/or an expression level of one or a plurality of underexpressed proteins selected from the group consisting of VEGFR2, HER3, ASNS, MAPK9, ESR1, YWHAE, RAD50, PGR, COL6A1, PEA15 and RPS6, in one or a plurality of cancer cells, tissues or organs of the mammal, wherein: a higher relative expression level of the one or plurality of overexpressed proteins compared to the one or plurality of underexpressed proteins indicates or correlates with a less favourable cancer prognosis; and/or a lower relative expression level of the one or plurality of overexpressed proteins compared to the one or plurality of underexpressed proteins indicates or correlates with a more favourable cancer prognosis compared to a mammal having a higher expression level.

55-58. (canceled)

59. A method of predicting the responsiveness of a cancer to an anti-cancer treatment in a mammal, said method including the step of determining an expression level of one or plurality of genes associated with chromosomal instability in one or a plurality of non-mitotic cells of the mammal, wherein a higher expression level indicates or correlates with relatively increased responsiveness of the cancer to the anti-cancer treatment.

60. (canceled)

61. The method of claim 59, wherein the one or plurality of genes associated with chromosomal instability are listed in Table 4 and/or include one or more genes associated with aneuploidy.

62-64. (canceled)

65. A method of predicting the responsiveness of a cancer to an anti-cancer treatment in a mammal, said method including the step of comparing an expression level of one or a plurality of overexpressed genes and/or an expression level of one or a plurality of underexpressed genes in one or a plurality of cancer cells, tissues or organs of the mammal, wherein the overexpressed genes and the underexpressed genes are from one or a plurality of metagenes selected from the group consisting of a Carbohydrate/Lipid Metabolism metagene, a Cell Signalling metagene, a Cellular Development metagene, a Cellular Growth metagene, a Chromosome Segregation metagene, a DNA Replication/Recombination metagene, an Immune System metagene, a Metabolic Disease metagene, a Nucleic Acid Metabolism metagene, a Post-Translational Modification metagene, a Protein Synthesis/Modification metagene and a Multiple Networks metagene, wherein an altered or modulated relative expression level of the overexpressed genes compared to the underexpressed genes indicates or correlates with relatively increased or decreased responsiveness of the cancer to the anti-cancer treatment.

66. (canceled)

67. The method of claim 65, wherein the Carbohydrate/Lipid Metabolism metagene, the Cell Signalling metagene, the Cellular Development metagene, the Cellular Growth metagene, the Chromosome Segregation metagene, the DNA Replication/Recombination metagene, the Immune System metagene, the Metabolic Disease metagene, the Nucleic Acid Metabolism metagene, the Post-Translational Modification metagene, the Protein Synthesis/Modification metagene and/or the Multiple Networks metagene comprise one or more genes listed in Table 21.

68. A method of predicting the responsiveness of a cancer to an anti-cancer treatment in a mammal, said method including the step of comparing an expression level of one or a plurality of overexpressed genes and/or an expression level of one or a plurality of underexpressed genes in one or a plurality of cancer cells, tissues or organs of the mammal, wherein the overexpressed genes and the underexpressed genes are from one or a plurality of metagenes selected from the group consisting of a Metabolism metagene, a Signalling metagene, a Development and Growth metagene, a Chromosome Segregation/Replication metagene, an Immune Response metagene and a Protein Synthesis/Modification metagene, wherein an altered or modulated relative expression level of the overexpressed genes compared to the underexpressed genes indicates or correlates with relatively increased or decreased responsiveness of the cancer to the anti-cancer treatment.

69. (canceled)

70. The method of claim 68, wherein the Metabolism metagene, the Signalling metagene, the Development and Growth metagene, the Chromosome Segregation/Replication metagene, the Immune Response metagene and/or the Protein Synthesis/Modification metagene comprise one or more genes listed in Table 22.

71-75. (canceled)

76. A method of predicting the responsiveness of a cancer to an anti-cancer treatment in a mammal, said method including the step of comparing an expression level of a one or plurality of overexpressed genes associated with chromosomal instability and/or an expression level of one or a plurality of underexpressed genes associated with estrogen receptor signalling in one or a plurality of cancer cells, tissues or organs of the mammal, wherein an altered or modulated relative expression level of the overexpressed genes associated with chromosomal instability compared to the underexpressed genes associated with estrogen receptor signalling indicates or correlates with relatively increased or decreased responsiveness of the cancer to the anti-cancer treatment.

77. The method of claim 76, wherein the genes associated with chromosomal instability are of a CIN metagene.

78. The method of claim 77, wherein the CIN metagene comprises a plurality of genes listed in Table 4.

79-80. (canceled)

81. The method claim 76, wherein the genes associated with estrogen receptor signalling are of an ER metagene.

82. The method of claim 81, wherein the genes are selected from the group consisting of: BTG2, PIK3IP1, SEC14L2, FLNB, ACSF2, APOM, BIN3, GLTSCR2, ZMYND10, ABAT, BCAT2, SCUBE2, RUNX1, LRRC48, MYBPC1, BCL2, CHPT1, ITM2A, LRIG1, MAPT, PRKCB, RERE, ABHD14A, FLT3, TNN, STC2, BATF, CD1E, CFB, EVL, FBXW4, ABCB1, ACAA1, CHAD, PDCD4, RPL10, RPS28, RPS4X, RPS6, SORBS1, RPL22 and RPS4XP3.

83-96. (canceled)

97. A method of predicting the responsiveness of a cancer to an anti-cancer treatment in a mammal, said method including the step of comparing an expression level of one or a plurality of overexpressed genes selected from the group consisting of CAMSAP1, CETN3, GRHPR, ZNF593, CA9, CFDP1, VPS28, ADORA2B, GSK3B, LAMA4, MAP2K5, HCFC1R1, KCNG1, BCAP31, ULBP2, CARHSP1, PML, CD36, CD55, GEMIN4, TXN, ABHD5, EIF3K, EIF4B, EXOSC7, GNB2L1, LAMA3, NDUFC1 and STAU1, and/or an expression level of one or a plurality of underexpressed genes selected from the group consisting of BRD8, BTN2A2. KIR2DL4. ME1, PSEN2, CALR, CAMK4, ITM2C, NOP2, NSUN5, SF3B1, ZNRD1-AS1, ARNT2, ERC2, SLC11A1, BRD4, APOBEC3A, CD1A, CD1B, CD1C, CXCR4, HLA-B, IGH, KIR2DL3, SMPDL3B, MYB, RLN1, MTMR7, SORBS1 and SRPK3, in one or a plurality of cancer cells, tissues or organs of the mammal, wherein an altered or modulated relative expression level of the one or plurality of overexpressed genes compared to the one or plurality of underexpressed genes indicates or correlates with relatively increased or decreased responsiveness of the cancer to the anti-cancer treatment.

98. The method of claim 97, wherein the one or plurality of overexpressed genes are selected from the group consisting of ABHD5, ADORA2B, BCAP31, CA9, CAMSAP1, CARHSP1, CD55, CETN3, EIF3K, EXOSC7, GNB2L1, GRHPR, GSK3B, HCFC1R1, KCNG1, MAP2K5, NDUFC1, PML, STAU1, TXN and ZNF593 and/or the one or plurality of underexpressed genes are selected from the group consisting of BTN2A2, ERC2, IGH, ME1, MTMR7, SMPDL3B and ZNRD1-AS1.

99-110. (canceled)

111. A method of predicting the responsiveness of a cancer to an anti-cancer treatment in a mammal, said method including the step of comparing an expression level of one or a plurality of overexpressed proteins selected from the group consisting of DVL3, PAI-1, VEGFR2, INPP4B, EIF4EBP1, EGFR, Ku80, HER3, SMAD1, GATA3, ITGA2, AKT1, NFKB1, HER2, ASNS and COL6A1, and/or an expression level of one or a plurality of underexpressed proteins selected from the group consisting of VEGFR2, HER3, ASNS, MAPK9, ESR1, YWHAE, RAD50, PGR, COL6A1, PEA15 and RPS6, in one or a plurality of cancer cells, tissues or organs of the mammal, wherein an altered or modulated relative expression level of the one or plurality of overexpressed proteins compared to the one or plurality of underexpressed proteins indicates or correlates with relatively increased or decreased responsiveness of the cancer to the anti-cancer treatment.

112-119. (canceled)

120. A method of predicting the responsiveness of a cancer to an immunotherapeutic agent in a mammal, said method including the step of comparing an expression level of one or a plurality of overexpressed genes selected from the group consisting of ADORA2B, CD36, CETN3, KCNG1, LAMA3, MAP2K5, NAE1, PGK1, STAU1, CFDP1, SF3B3 and TXN, and/or an expression level of one or a plurality of underexpressed genes selected from the group consisting of APOBEC3A, BCL2, BTN2A2, CAMSAP1, CAMK4, CARHSP1, FBXW4, GSK3B, HCFC1R1, MYB, PSEN2 and ZNF593, in one or a plurality of cancer cells, tissues or organs of the mammal, wherein an altered or modulated relative expression level of the one or plurality of overexpressed genes compared to the one or plurality of underexpressed genes indicates or correlates with relatively increased or decreased responsiveness of the cancer to the immunotherapeutic agent.

121. (canceled)

122. The method of claim 120, wherein the immunotherapeutic agent is an immune checkpoint inhibitor.

123. The method of claim 122, wherein the immune checkpoint inhibitor is or comprises an anti-PD1 antibody or an anti-PDL1 antibody.

124. A method of predicting the responsiveness of a cancer to an epidermal growth factor receptor (EGFR) inhibitor in a mammal, said method including the step of comparing an expression level of one or a plurality of overexpressed genes selected from the group consisting of NAE1, GSK3B, TAF2, MAPRE1, BRD4, STAU1, TAF2, PDCD4, KCNG1, ZNRD1-AS1, EIF4B, HELLS, RPL22, ABAT, BTN2A2, CD1B, ITM2A, BCL2, CXCR4, and ARNT2 and/or an expression level of one or a plurality of underexpressed genes selected from the group consisting of CD1C, CD1E, CD1B, KDM5A, BATF, EVL, PRKCB, HCFC1R1, CARHSP1, CHAD, KIR2DL4, ABHD5, ABHD14A, ACAA1, SRPK3, CFB, ARNT2, NDUFC1, BCL2, EVL, ULBP2, BIN3, SF3B3, CETN3, SYNCRIP, TAF2, CENPN, ATP6V1C1, CD55 and ADORA2B, in one or a plurality of cancer cells, tissues or organs of the mammal, wherein an altered or modulated relative expression level of the one or plurality of overexpressed genes compared to the one or plurality of underexpressed genes indicates or correlates with relatively increased or decreased responsiveness of the cancer to the immunotherapeutic agent.

125. A method of predicting the responsiveness of a cancer to a multikinase inhibitor in a mammal, said method including the step of comparing an expression level of one or a plurality of overexpressed genes selected from the group consisting of SCUBE, CHPT1, CDC1, BTG2, ADORA2B and BCL2, and/or an expression level of one or a plurality of underexpressed genes selected from the group consisting of NOP2, CALR, MAPRE1, KCNG1, PGK1, SRPK3, RERE, ADM, LAMA3, KIR2DL4, ULBP2, LAMA4, CA9, and BCAP31, in one or a plurality of cancer cells, tissues or organs of the mammal, wherein an altered or modulated relative expression level of the one or plurality of overexpressed genes compared to the one or plurality of underexpressed genes indicates or correlates with relatively increased or decreased responsiveness of the cancer to the multikinase inhibitor.

126. (canceled)

127. A method for identifying an agent for use in the treatment of cancer including the steps of:
(i) contacting a protein product of GRHPR, NDUFC1, CAMSAP1, CETN3, EIF3K, STAU1, EXOSC7, COG8, CFDP1 and/or KCNG1 with a test agent; and
(ii) determining whether the test agent, at least partly, reduces, eliminates, suppresses or inhibits the expression and/or an activity of the protein product.

128-129. (canceled)

130. A method of treating a cancer in a mammal, including the step of administering to the mammal a therapeutically effective amount of the agent identified by the method of claim 127.

131-134. (canceled)

The application's sequence listing, which the Patent Office published only in electronic form, follows.

SEQUENCE LISTING (133 sequences)

SEQ ID NO: 1 - protein, 1235 aa, Homo sapiens
MATGTGKHKLLSTGPTEPWSIREKLCLASSVMRSGDQNWVSVSRAIKPFAEPGRPPDWFSQKHCASQYSELLETTETPKRKRGEKGEVVETVEDVIVRKLTAERVEELKKVIKETQERYRRLKRDAELIQAGHMDSRLDELCNDIATKKKLEEEEAEVKRKATDAAYQARQAVKTPPRRLPTVMVRSPIDSASPGGDYPLGDLTPTTMEEATSGVNESEMAVASGHLNSTGVLLEVGGVLPMIHGGEIQQTPNTVAASPAASGAPTLSRLLEAGPTQFTTPLASFTTVASEPPVKLVPPPVESVSQATIVMMPALPAPSSAPAVSTTESVAPVSQPDNCVPMEAVGDPHTVTVSMDSSEISMIINSIKEECFRSGVAEAPVGSKAPSIDGKEELDLAEKMDIAVSYTGEELDFETVGDIIAIIEDKVDDHPEVLDVAAVEAALSFCEENDDPQSLPGPWEHPIQQERDKPVPLPAPEMTVKQERLDFEETENKGIHELVDIREPSAEIKVEPAEPEPVISGAEIVAGVVPATSMEPPELRSQDLDEELGSTAAGEIVEADVAIGKGDETPLTNVKTEASPESMLSPSHGSNPIEDPLEAETQHKFEMSDSLKEESGTIFGSQIKDAPGEDEEEDGVSEAASLEEPKEEDQGEGYLSEMDNEPPVSESDDGFSIHNATLQSHTLADSIPSSPASSQFSVCSEDQEAIQAQKIWKKAIMLVWRAAANHRYANVFLQPVTDDIAPGYHSIVQRPMDLSTIKKNIENGLIRSTAEFQRDIMLMFQNAVMYNSSDHDVYHMAVEMQRDVLEQIQQFLATQLIMQTSESGISAKSLRGRDSTRKQDASEKDSVPMGSPAFLLSLFMGHEWVWLDSEQDHPNDSELSNDCRSLFSSWDSSLDLDVGNWRETEDPEAEELEESSPEREPSELLVGDGGSEESQEAARKASHQNLLHFLSEVAYLMEPLCISSNESSEGCCPPSGTRQEGREIKASEGERELCRETEELSAKGDPLVAEKPLGENGKPEVASAPSVICTVQGLLTESEEGEAQQESKGEDQGEVYVSEMEDQPPSGECDDAFNIKETPLVDTLFSHATSSKLTDLSQDDPVQDHLLFKKTLLPVWKMIASHRFSSPFLKPVSERQAPGYKDVVKRPMDLTSLKRNLSKGRIRTMAQFLRDLMLMFQNAVMYNDSDHHVYHMAVEMRQEVLEQIQVLNIWLDKRKGSSSLEGEPANPVDDGKPVF

SEQ ID NO: 2 - protein, 158 aa, Homo sapiens
MSHGKGTDMLPEIAAAVGFLSSLLRTRGCVSEQRLKVFSGALQEALTEHYKHHWFPEKPSKGSGYRCIRINHKMDPIISRVASQIGLSQPQLHQLLPSELTLWVDPYEVSYRIGEDGSICVLYEEAPLAASCGLLTCKNQVLLGRSSPSKNYVMAVSS

SEQ ID NO: 3 - protein, 523 aa, Homo sapiens
MEPAAALHFSLPASLLLLLLLLLLSLCALVSAQFTVVGPANPILAMVGENTTLRCHLSPEKNAEDMEVRWFRSQFSPAVFVYKGGRERTEEQMEEYRGRITFVSKDINRGSVALVIHNVTAQENGIYRCYFQEGRSYDEAILRLVVAGLGSKPLIEIKAQEDGSIWLECISGGWYPEPLTVWRDPYGEVVPALKEVSIADADGLFMVTTAVIIRDKYVRNVSCSVNNTLLGQEKETVIFIPESFMPSASPWMVALAVILTASPWMVSMTVILAVFIIFMAVSICCIKKLQREKKILSGEKKVEQEEKEIAQQLQEELRWRRTFLHAADVVLDPDTAHPELFLSEDRRSVRRGPYRQRVPDNPERFDSQPCVLGWESFASGKHYWEVEVENVMVWTVGVCRHSVERKGEVLLIPQNGFWTLEMFGNQYRALSSPERILPLKESLCRVGVFLDYEAGDVSFYNMRDRSHIYTCPRSAFTVPVRPFFRLGSDDSPIFICPALTGASGVMVPEEGLKLHRVGTHQSL

SEQ ID NO: 4 - protein, 377 aa, Homo sapiens
MSMSPTVIILACLGFFLDQSVWAHVGGQDKPFCSAWPSAVVPQGGHVTLRCHYRRGFNIFTLYKKDGVPVPELYNRIFWNSFLISPVTPAHAGTYRCRGFHPHSPTEWSAPSNPLVIMVTGLYEKPSLTARPGPTVRAGENVTLSCSSQSSFDIYHLSREGEAHELRLPAVPSINGTFQADFPLGPATHGETYRCFGSFHGSPYEWSDPSDPLPVSVTGNPSSSWPSPTEPSFKTGIARHLHAVIRYSVAIILFTILPFFLLHRWCSKKKDAAVMNQEPAGHRTVNREDSDEQDPQEVTYAQLDHCIFTQRKITGPSQRSKRPSTDTSVCIELPNAEPRALSPAHEHHSQALMGSSRETTALSQTQLASSNVPAAGI

SEQ ID NO: 5 - protein, 572 aa, Homo sapiens
MEPEAPRRRHTHQRGYLLTRNPHLNKDLAFTLEERQQLNIHGLLPPSFNSQEIQVLRVVKNFEHLNSDFDRYLLLMDLQDRNEKLFYRVLTSDIEKFMPIVYTPTVGLACQQYSLVFRKPRGLFITIHDRGHIASVLNAWPEDVIKAIVVTDGERILGLGDLGCNGMGIPVGKLALYTACGGMNPQECLPVILDVGTENEELLKDPLYIGLRQRRVRGSEYDDFLDEFMEAVSSKYGMNCLIQFEDFANVNAFRLLNKYRNQYCTFNDDIQGTASVAVAGLLAALRITKNKLSDQTILFQGAGEAALGIAHLIVMALEKEGLPKEKAIKKIWLVDSKGLIVKGRASLTQEKEKFAHEHEEMKNLEAIVQEIKPTALIGVAAIGGAFSEQILKDMAAFNERPIIFALSNPTSKAECSAEQCYKITKGRAIFASGSPFDPVTLPNGQTLYPGQGNNSYVFPGVALGVVACGLRQITDNIFLTTAEVIAQQVSDKHLEEGRLYPPLNTIRDVSLKIAEKIVKDAYQEKTATVYPEPQNKEAFVRSQMYSTDYDQILPDCYSWPEEVQKIQTKVDQ

SEQ ID NO: 6 - protein, 263 aa, Homo sapiens
MLLAWVQAFLVSNMLLAEAYGSGGCFWDNGHLYREDQTSPAPGLRCLNWLDAQSGLASAPVSGAGNHSYCRNPDEDPRGPWCYVSGEAGVPEKRPCEDLRCPETTSQALPAFTTEIQEASEGPGADEVQVFAPANALPARSEAAAVQPVIGISQRVRMNSKEKKDLGTLGYVLGITMMVIIIAIGAGIILGYSYKRGKDLKEQHDQKVCEREMQRITLPLSAFTNPTCEIVDEKTVVVHTSQTPVDPQEGTTPLMGQAGTPGA

SEQ ID NO: 7 - protein, 403 aa, Homo sapiens
MSGRVGDLSPRQKEALAKFRENVQDVLPALPNPDDYFLLRWLRARSFDLQKSEAMLRKHVEFRKQKDIDNIISWQPPEVIQQYLSGGMCGYDLDGCPVWYDIIGPLDAKGLLFSASKQDLLRTKMRECELLLQECAHQTTKLGRKVETITIIYDCEGLGLKHLWKPAVEAYGEFLCMFEENYPETLKRLFVVKAPKLFPVAYNLIKPFLSEDTRKKIMVLGANWKEVLLKHISPDQVPVEYGGTMTDPDGNPKCKSKINYGGDIPRKYYVRDQVKQQYEHSVQISRGSSHQVEYEILFPGCVLRWQFMSDGADVGFGIFLKTKMGERQRAGEMTEVLPNQRYNSHLVPEDGTLTCSDPGIYVLRFDNTYSFIHAKKVNFTVEVLLPDKASEEKMKQLGAGTPK

SEQ ID NO: 8 - protein, 448 aa, Homo sapiens
MLTFMASDSEEEVCDERTSLMSAESPTPRSCQEGRQGPEDGENTAQWRSQENEEDGEEDPDRYVCSGVPGRPPGLEEELTLKYGAKHVIMLFVPVTLCMIVVVATIKSVRFYTEKNGQLIYTPFTEDTPSVGQRLLNSVLNTLIMISVIVVMTIFLVVLYKYRCYKFIHGWLIMSSLMLLFLFTYIYLGEVLKTYNVAMDYPTLLLTVWNFGAVGMVCIHWKGPLVLQQAYLIMISALMALVFIKYLPEWSAWVILGAISVYDLVAVLCPKGPLRMLVETAQERNEPIFPALIYSSAMVWTVGMAKLDPSSQGALQLPYDPEMEEDSYDSFGEPSYPEVFEPPLTGYPGEELEEEEERGVKLGLGDFIFYSVLVGKAAATGSGDWNTTLACFVAILIGLCLTLLLLAVFKKALPALPISITFGLIFYFSTDNLVRPFMDTLASHQLYI

SEQ ID NO: 9 - protein, 2602 aa, Homo sapiens
MPVTEKDLAEDAPWKKIQQNTFTRWCNEHLKCVNKRIGNLQTDLSDGLRLIALLEVLSQKRMYRKYHQRPTFRQMQLENVSVALEFLDRESIKLVSIDSKAIVDGNLKLILGLVWTLILHYSISMPVWEDEGDDDAKKQTPKQRLLGWIQNKIPYLPITNFNQNWQDGKALGALVDSCAPGLCPDWESWDPQKPVDNAREAMQQADDWLGVPQVITPEEIIHPDVDEHSVMTYLSQFPKAKLKPGAPLKPKLNPKKARAYGRGIEPTGNMVKQPAKFTVDTISAGQGDVMVFVEDPEGNKEEAQVTPDSDKNKTYSVEYLPKVTGLHKVTVLFAGQHISKSPFEVSVDKAQGDASKVTAKGPGLEAVGNIANKPTYFDIYTAGAGVGDIGVEVEDPQGKNTVELLVEDKGNQVYRCVYKPMQPGPHVVKIFFAGDTIPKSPFVVQVGEACNPNACRASGRGLQPKGVRIRETTDFKVDTKAAGSGELGVTMKGPKGLEELVKQKDFLDGVYAFEYYPSTPGRYSIAITWGGHHIPKSPFEVQVGPEAGMQKVRAWGPGLHGGIVGRSADFVVESIGSEVGSLGFAIEGPSQAKIEYNDQNDGSCDVKYWPKEPGEYAVHIMCDDEDIKDSPYMAFIHPATGGYNPDLVRAYGPGLEKSGCIVNNLAEFTVDPKDAGKAPLKIFAQDGEGQRIDIQMKNRMDGTYACSYTPVKAIKHTIAVVWGGVNIPHSPYRVNIGQGSHPQKVKVFGPGVERSGLKANEPTHFTVDCTEAGEGDVSVGIKCDARVLSEDEEDVDFDIIHNANDTFTVKYVPPAAGRYTIKVLFASQEIPASPFRVKVDPSHDASKVKAEGPGLSKAGVENGKPTHFTVYTKGAGKAPLNVQFNSPLPGDAVKDLDIIDNYDYSHTVKYTPTQQGNMQVLVTYGGDPIPKSPFTVGVAAPLDLSKIKLNGLENRVEVGKDQEFTVDTRGAGGQGKLDVTILSPSRKVVPCLVTPVTGRENSTAKFIPREEGLYAVDVTYDGHPVPGSPYTVEASLPPDPSKVKAHGPGLEGGLVGKPAEFTIDTKGAGTGGLGLTVEGPCEAKIECSDNGDGTCSVSYLPTKPGEYFVNILFEEVHIPGSPFKADIEMPFDPSKVVASGPGLEHGKVGEAGLLSVDCSEAGPGALGLEAVSDSGTKAEVSIQNNKDGTYAVTYVPLTAGMYTLTMKYGGELVPHFPARVKVEPAVDTSRIKVFGPGIEGKDVFREATTDFTVDSRPLTQVGGDHIKAHIANPSGASTECFVTDNADGTYQVEYTPFEKGLHVVEVTYDDVPIPNSPFKVAVTEGCQPSRVQAQGPGLKEAFTNKPNVFTVVTRGAGIGGLGITVEGPSESKINCRDNKDGSCSAEYIPFAPGDYDVNITYGGAHIPGSPFRVPVKDVVDPSKVKIAGPGLGSGVRARVLQSFTVDSSKAGLAPLEVRVLGPRGLVEPVNVVDNGDGTHTVTYTPSQEGPYMVSVKYADEEIPRSPFKVKVLPTYDASKVTASGPGLSSYGVPASLPVDFAIDARDAGEGLLAVQITDQEGKPKRAIVHDNKDGTYAVTYIPDKTGRYMIGVTYGGDDIPLSPYRIRATQTGDASKCLATGPGIASTVKTGEEVGFVVDAKTAGKGKVTCTVLTPDGTEAEADVIENEDGTYDIFYTAAKPGTYVIYVRFGGVDIPNSPFTVMATDGEVTAVEEAPVNACPPGFRPWVTEEAYVPVSDMNGLGFKPFDLVIPFAVRKGEITGEVHMPSGKTATPEIVDNKDGTVTVRYAPTEVGLHEMHIKYMGSHIPESPLQFYVNYPNSGSVSAYGPGLVYGVANKTATFTIVTEDAGEGGLDLAIEGPSKAEISCIDNKDGTCTVTYLPTLPGDYSILVKYNDKHIPGSPFTAKITDDSRRCSQVKLGSAADFLLDISETDLSSLTASIKAPSGRDEPCLLKRLPNNHIGISFIPREVGEHLVSIKKNGNHVANSPVSIMVVQSEIGDARRAKVYGRGLSEGRTFEMSDFIVDTRDAGYGGISLAVEGPSKVDIQTEDLEDGTCKVSYFPTVPGVYIVSTKFADEHVPGSPFTVKISGEGRVKESITRTSRAPSVATVGSICDLNLKIPEINSSDMSAHVTSPSGRVTEAEIVPMGKNSHCVRFVPQEMGVHTVSVKYRGQHVTGSPFQFTVGPLGEGGAHKVRAGGPGLERGEAGVPAEFSIWTREAGAGGLSIAVEGPSKAEITFDDHKNGSCGVSYIAQEPGNYEVSIKFNDEHIPESPYLVPVIAPSDDARRLTVMSLQESGLKVNQPASFAIRLNGAKGKIDAKVHSPSGAVEECHVSELEPDKYAVRFIPHENGVHTIDVKFNGSHVVGSPFKVRVGEPGQAGNPALVSAYGTGLEGGTTGIQSEFFINTTRAGPGTLSVTIEGPSKVKMDCQETPEGYKVMYTPMAPGNYLISVKYGGPNHIVGSPFKAKVTGQRLVSPGSANETSSILVESVTRSSTETCYSAIPKASSDASKVTSKGAGLSKAFVGQKSSFLVDCSKAGSNMLLIGVHGPTTPCEEVSMKHVGNQQYNVTYVVKERGDYVLAVKWGEEHIPGSPFHVTVP

SEQ ID NO: 10 - protein, 615 aa, Homo sapiens
MAVYVGMLRLGRLCAGSSGVLGARAALSRSWQEARLQGVRFLSSREVDRMVSTPIGGLSYVQGCTKKHLNSKTVGQCLETTAQRVPEREALVVLHEDVRLTFAQLKEEVDKAASGLLSIGLCKGDRLGMWGPNSYAWVLMQLATAQAGIILVSVNPAYQAMELEYVLKKVGCKALVFPKQFKTQQYYNVLKQICPEVENAQPGALKSQRLPDLTTVISVDAPLPGTLLLDEVVAAGSTRQHLDQLQYNQQFLSCHDPINIQFTSGTTGSPKGATLSHYNIVNNSNILGERLKLHEKTPEQLRMILPNPLYHCLGSVAGTMMCLMYGATLILASPIFNGKKALEAISRERGTFLYGTPTMFVDILNQPDFSSYDISTMCGGVIAGSPAPPELIRAIINKINMKDLVVAYGTTENSPVTFAHFPEDTVEQKAESVGRIMPHTEARIMNMEAGTLAKLNTPGELCIRGYCVMLGYWGEPQKTEEAVDQDKWYWTGDVATMNEQGFCKIVGRSKDMIIRGGENIYPAELEDFFHTHPKVQEVQVVGVKDDRMGEEICACIRLKDGEETTVEEIKAFCKGKISHFKIPKYIVFVTNYPLTISGKIQKFKLREQMERHLNL

SEQ ID NO: 11 - protein, 188 aa, Homo sapiens
MFHQIWAALLYFYGIILNSIYQCPEHSQLTTLGVDGKEFPEVHLGQWYFIAGAAPTKEELATFDPVDNIVFNMAAGSAPMQLHLRATIRMKDGLCVPRKWIYHLTEGSTDLRTEGRPDMKTELFSSSCPGGIMLNETGQGYQRFLLYNRSPHPPEKCVEEFKSLTSCLDSKAFLLTPRNQEACELSNN

SEQ ID NO: 12 - protein, 253 aa, Homo sapiens
MSWIPFKIGQPKKQIVPKTVERDFEREYGKLQQLEEQTRRLQKDMKKSTDADLAMSKSAVKISLDLLSNPLCEQDQDLLNMVTALDTAMKRMDAFNQEKVNQIQKTVIEPLKKFGSVFPSLNMAVKRREQALQDYRRLQAKVEKYEEKEKTGPVLAKLHQAREELRPVREDFEAKNRQLLEEMPRFYGSRLDYFQPSFESLIRAQVVYYSEMHKIFGDLSHQLDQPGHSDEQRERENEAKLSELRALSIVADD

SEQ ID NO: 13 - protein, 417 aa, Homo sapiens
MLLSVPLLLGLLGLAVAEPAVYFKEQFLDGDGWTSRWIESKHKSDFGKFVLSSGKFYGDEEKDKGLQTSQDARFYALSASFEPFSNKGQTLVVQFTVKHEQNIDCGGGYVKLFPNSLDQTDMHGDSEYNIMFGPDICGPGTKKVHVIFNYKGKNVLINKDIRCKDDEFTHLYTLIVRPDNTYEVKIDNSQVESGSLEDDWDFLPPKKIKDPDASKPEDWDERAKIDDPTDSKPEDWDKPEHIPDPDAKKPEDWDEEMDGEWEPPVIQNPEYKGEWKPRQIDNPDYKGTWIHPEIDNPEYSPDPSIYAYDNFGVLGLDLWQVKSGTIFDNFLITNDEAYAEEFGNETWGVTKAAEKQMKDKQDEEQRLKEEEEDKKRKEEEEAEDKEDDEDKDEDEEDEEDKEEDEEEDVPGQAKDEL

SEQ ID NO: 14 - protein, 473 aa, Homo sapiens
MLKVTVPSCSASSCSSVTASAAPGTASLVPDYWIDGSNRDALSDFFEVESELGRGATSIVYRCKQKGTQKPYALKVLKKTVDKKIVRTEIGVLLRLSHPNIIKLKEIFETPTEISLVLELVTGGELFDRIVEKGYYSERDAADAVKQILEAVAYLHENGIVHRDLKPENLLYATPAPDAPLKIADFGLSKIVEHQVLMKTVCGTPGYCAPEILRGCAYGPEVDMWSVGIITYILLCGFEPFYDERGDQFMFRRILNCEYYFISPWWDEVSLNAKDLVRKLIVLDPKKRLTTFQALQHPWVTGKAANFVHMDTAQKKLQEFNARRKLKAAVKAVVASSRLGSASSSHGSIQESHKASRDPSPIQDGNEDMKAIPEGEKIQGDGAQAAVKGAQAELMKVQALEKVKGADINAEEAPKMVPKAVEDGIKVADLELEEGLAEEKLKTVEEAAAPREGQGSSAVGFEVPQQDVILPEY

SEQ ID NO: 15 - protein, 478 aa, Homo sapiens
MAAGGSGVGGKRSSKSDADSGFLGLRPTSVDPALRRRRRGPRNKKRGWRRLAQEPLGLEVDQFLEDVRLQERTSGGLLSEAPNEKLFFVDTGSKEKGLTKKRTKVQKKSLLLKKPLRVDLILENTSKVPAPKDVLAHQVPNAKKLRRKEQLWEKLAKQGELPREVRRAQARLLNPSATRAKPGPQDTVERPFYDLWASDNPLDRPLVGQDEFFLEQTKKKGVKRPARLHTKPSQAPAVEVAPAGASYNPSFEDHQTLLSAAHEVELQRQKEAEKLERQLALPATEQAATQESTFQELCEGLLEESDGEGEPGQGEGPEAGDAEVCPTPARLATTEKKTEQQRRREKAVHRLRVQQAALRAARLRHQELFRLRGIKAQVALRLAELARRQRRRQARREAEADKPRRLGRLKYQAPDIDVQLSSELTDSLRTLKPEGNILRDRFKSFQRRNMIEPRERAKFKRKYKVKLVEKRAFREIQL

SEQ ID NO: 16 - protein, 267 aa, Homo sapiens
MVKISFQPAVAGIKGDKADKASASAPAPASATEILLTPAREEQPPQHRSKRGGSVGGVCYLSMGMVVLLMGLVFASVYIYRYFFLAQLARDNFFRCGVLYEDSLSSQVRTQMELEEDVKIYLDENYERINVPVPQFGGGDPADIIHDFQRGLTAYHDISLDKCYVIELNTTIVLPPRNFWELLMNVKRGTYLPQTYIIQEEMVVTEHVSDKEALGSFIYHLCNGKDTYRLRRRATRRRINKRGAKNCNAIRHFENTFVVETLICGVV

SEQ ID NO: 17 - protein, 812 aa, Homo sapiens
MGRKLDPTKEKRGPGRKARKQKGAETELVRFLPAVSDENSKRLSSRARKRAAKRRLGSVEAPKTNKSPEAKPLPGKLPKGISAGAVQTAGKKGPQSLFNAPRGKKRPAPGSDEEEEEEDSEEDGMVNHGDLWGSEDDADTVDDYGADSNSEDEEEGEALLPIERAARKQKAREAAAGIQWSEEETEDEEEEKEVTPESGPPKVEEADGGLQINVDEEPFVLPPAGEMEQDAQAPDLQRVHKRIQDIVGILRDFGAQREEGRSRSEYLNRLKKDLAIYYSYGDFLLGKLMDLFPLSELVEFLEANEVPRPVTLRTNTLKTRRRDLAQALINRGVNLDPLGKWSKTGLVVYDSSVPIGATPEYLAGHYMLQGASSMLPVMALAPQEHERILDMCCAPGGKTSYMAQLMKNTGVILANDANAERLKSVVGNLHRLGVTNTIISHYDGRQFPKVVGGFDRVLLDAPCSGTGVISKDPAVKTNKDEKDILRCAHLQKELLLSAIDSVNATSKTGGYLVYCTCSITVEENEWVVDYALKKRNVRLVPTGLDFGQEGFTRFRERRFHPSLRSTRRFYPHTHNMDGFFIAKFKKFSNSIPQSQTGNSETATPTNVDLPQVIPKSENSSQPAKKAKGAAKTKQQLQKQQHPKKASFQKLNGISKGADSELSTVPSVTKTQASSSFQDSSQPAGKAEGIREPKVTGKLKQRSPKLQSSKKVAFLRQNAPPKGTDTQTPAVLSPSKTQATLKPKDHHQPLGRAKGVEKQQLPEQPFEKAAFQKQNDTPKGPQPPTVSPIRSSRPPPAKRKKSQSRGNSQLLLS

SEQ ID NO: 18 - protein, 429 aa, Homo sapiens
MGLYAAAAGVLAGVESRQGSIKGLVYSSNFQNVKQLYALVCETQRYSAVLDAVIASAGLLRAEKKLRPHLAKVLVYELLLGKGFRGGGGRWKALLGRHQARLKAELARLKVHRGVSRNEDLLEVGSRPGPASQLPRFVRVNTLKTCSDDVVDYFKRQGFSYQGRASSLDDLRALKGKHFLLDPLMPELLVFPAQTDLHEHPLYRAGHLILQDRASCLPAMLLDPPPGSHVIDACAAPGNKTSHLAALLKNQGKIFAFDLDAKRLASMATLLARAGVSCCELAEEDFLAVSPSDPRYHEVHYILLDPSCSGSGMPSRQLEEPGAGTPSPVRLHALAGFQQRALCHALTFPSLQRLVYSTCSLCQEENEDVVRDALQQNPGAFRLAPALPAWPHRGLSTFPGAEHCLRASPETTLSSGFFVAVIERVEVPR

SEQ ID NO: 19 - protein, 440 aa, Homo sapiens
MGDLELLLPGEAEVLVRGLRSFPLREMGSEGWNQQHENLEKLNMQAILDATVSQGEPIQELLVTHGKVPTLVEELIAVEMWKQKVFPVFCRVEDFKPQNTFPIYMVVHHEASIINLLETVFFHKEVCESAEDTVLDLVDYCHRKLTLLVAQSGCGGPPEGEGSQDSNPMQELQKQAELMEFEIALKALSVLRYITDCVDSLSLSTLSRMLSTHNLPCLLVELLEHSPWSRREGGKLQQFEGSRWHTVAPSEQQKLSKLDGQVWIALYNLLLSPEAQARYCLTSFAKGRLLKLRAFLTDTLLDQLPNLAHLQSFLAHLTLTETQPPKKDLVLEQIPEIWERLERENRGKWQAIAKHQLQHVFSPSEQDLRLQARRWAETYRLDVLEAVAPERPRCAYCSAEASKRCSRCQNEWYCCRECQVKHWEKHGKTCVLAAQGDRAK

SEQ ID NO: 20 - protein, 500 aa, Homo sapiens
MASMLLAQRLACSFQHSYRLLVPGSRHISQAAAKVDVEFDYDGPLMKTEVPGPRSQELMKQLNIIQNAEAVHFFCNYEESRGNYLVDVDGNRMLDLYSQISSVPIGYSHPALLKLIQQPQNASMFVNRPALGILPPENFVEKLRQSLLSVAPKGMSQLITMACGSCSNENALKTIFMWYRSKERGQRGFSQEELETCMINQAPGCPDYSILSFMGAFHGRTMGCLATTHSKAIHKIDIPSFDWPIAPFPRLKYPLEEFVKENQQEEARCLEEVEDLIVKYRKKKKTVAGIIVEPIQSEGGDNHASDDFFRKLRDIARKHGCAFLVDEVQTGGGCTGKFWAHEHWGLDDPADVMTFSKKMMTGGFFHKEEFRPNAPYRIFNTWLGDPSKNLLLAEVINIIKREDLLNNAAHAGKALLTGLLDLQARYPQFISRVRGRGTFCSFDTPDDSIRNKLILIARNKGVVLGGCGDKSIRFRPTLVFRDHHAHLFLNIFSDILADFK

SEQ ID NO: 21 - protein, 392 aa, Homo sapiens
MAAAALGQIWARKLLSVPWLLCGPRRYASSSFKAADLQLEMTQKPHKKPGPGEPLVFGKTFTDHMLMVEWNDKGWGQPRIQPFQNLTLHPASSSLHYSLQLFEGMKAFKGKDQQVRLFRPWLNMDRMLRSAMRLCLPSFDKLELLECIRRLIEVDKDWVPDAAGTSLYVRPVLIGNEPSLGVSQPTRALLFVILCPVGAYFPGGSVTPVSLLADPAFIRAWVGGVGNYKLGGNYGPTVLVQQEALKRGCEQVLWLYGPDHQLTEVGTMNIFVYWTHEDGVLELVTPPLNGVILPGVVRQSLLDMAQTWGEFRVVERTITMKQLLRALEEGRVREVFGSGTACQVCPVHRILYKDRNLHIPTMENGPELILRFQKELKEIQYGIRAHEWMFPV

SEQ ID NO: 22 - protein, 999 aa, Homo sapiens
MGVAGRNRPGAAWAVLLLLLLLPPLLLLAGAVPPGRGRAAGPQEDVDECAQGLDDCHADALCQNTPTSYKCSCKPGYQGEGRQCEDIDECGNELNGGCVHDCLNIPGNYRCTCFDGFMLAHDGHNCLDVDECLENNGGCQHTCVNVMGSYECCCKEGFFLSDNQHTCIHRSEEGLSCMNKDHGCSHICKEAPRGSVACECRPGFELAKNQRDCILTCNHGNGGCQHSCDDTADGPECSCHPQYKMHTDGRSCLEREDTVLEVTESNTTSVVDGDKRVKRRLLMETCAVNNGGCDRTCKDTSTGVHCSCPVGFTLQLDGKTCKDIDECQTRNGGCDHFCKNIVGSFDCGCKKGFKLLTDEKSCQDVDECSLDRTCDHSCINHPGTFACACNRGYTLYGFTHCGDTNECSINNGGCQQVCVNTVGSYECQCHPGYKLHWNKKDCVEVKGLLPTSVSPRVSLHCGKSGGGDGCFLRCHSGIHLSSDVTTIRTSVTFKLNEGKCSLKNAELFPEGLRPALPEKHSSVKESFRYVNLTCSSGKQVPGAPGRPSTPKEMFITVEFELETNQKEVTASCDLSCIVKRTEKRLRKAIRTLRKAVHREQFHLQLSGMNLDVAKKPPRTSERQAESCGVGQGHAENQCVSCRAGTYYDGARERCILCPNGTFQNEEGQMTCEPCPRPGNSGALKTPEAWNMSECGGLCQPGEYSADGFAPCHLCALGTFQPEAGRTSCFPCGGGLATKHQGATSFQDCETRVQCSPGHFYNTTTHRCIRCPVGTYQPEFGKNNCVSCPGNTTTDFDGSTNITQCKNRRCGGELGDFTGYIESPNYPGNYPANTECTWTINPPPKRRILIVVPEIFLPIEDDCGDYLVMRKTSSSNSVTTYETCQTYERPIAFTSRSKKLWIQFKSNEGNSARGFQVPYVTYDEDYQELIEDIVRDGRLYASENHQEILKDKKLIKALFDVLAHPQNYFKYTAQESREMFPRSFIRLLRSKVSRFLRPYK

SEQ ID NO: 23 - protein, 1304 aa, Homo sapiens
MAKIAKTHEDIEAQIREIQGKKAALDEAQGVGLDSTGYYDQEIYGGSDSRFAGYVTSIAATELEDDDDDYSSSTSLLGQKKPGYHAPVALLNDIPQSTEQYDPFAEHRPPKIADREDEYKKHRRTMIISPERLDPFADGGKTPDPKMNARTYMDVMREQHLTKEEREIRQQLAEKAKAGELKVVNGAAASQPPSKRKRRWDQTADQTPGATPKKLSSWDQAETPGHTPSLRWDETPGRAKGSETPGATPGSKIWDPTPSHTPAGAATPGRGDTPGHATPGHGGATSSARKNRWDETPKTERDTPGHGSGWAETPRTDRGGDSIGETPTPGASKRKSRWDETPASQMGGSTPVLTPGKTPIGTPAMNMATPTPGHIMSMTPEQLQAWRWEREIDERNRPLSDEELDAMFPEGYKVLPPPAGYVPIRTPARKLTATPTPLGGMTGFHMQTEDRTMKSVNDQPSGNLPFLKPDDIQYFDKLLVDVDESTLSPEEQKERKIMKLLLKIKNGTPPMRKAALRQITDKAREFGAGPLFNQILPLLMSPTLEDQERHLLVKVIDRILYKLDDLVRPYVHKILVVIEPLLIDEDYYARVEGREIISNLAKAAGLATMISTMRPDIDNMDEYVRNTTARAFAVVASALGIPSLLPFLKAVCKSKKSWQARHTGIKIVQQIAILMGCAILPHLRSLVEIIEHGLVDEQQKVRTISALAIAALAEAATPYGIESFDSVLKPLWKGIRQHRGKGLAAFLKAIGYLIPLMDAEYANYYTREVMLILIREFQSPDEEMKKIVLKVVKQCCGTDGVEANYIKTEILPPFFKHFWQHRMALDRRNYRQLVDTTVELANKVGAAEIISRIVDDLKDEAEQYRKMVMETIEKIMGNLGAADIDHKLEEQLIDGILYAFQEQTTEDSVMLNGFGTVVNALGKRVKPYLPQICGTVLWRLNNKSAKVRQQAADLISRTAVVMKTCQEEKLMGHLGVVLYEYLGEEYPEVLGSILGALKAIVNVIGMHKMTPPIKDLLPRLTPILKNRHEKVQENCIDLVGRIADRGAEYVSAREWMRICFELLELLKAHKKAIRRATVNTFGYIAKAIGPHDVLATLLNNLKVQERQNRVCTTVAIAIVAETCSPFTVLPALMNEYRVPELNVQNGVLKSLSFLFEYIGEMGKDYIYAVTPLLEDALMDRDLVHRQTASAVVQHMSLGVYGFGCEDSLNHLLNYVWPNVFETSPHVIQAVMGALEGLRVAIGPCRMLQYCLQGLFHPARKVRDVYWKIYNSIYIGSQDALIAHYPRIYNDDKNTYIRYELDYIL

SEQ ID NO: 24 - protein, 453 aa, Homo sapiens
MRIPVDASTSRRFTPPSTALSPGKMSEALPLGAPDAGAALAGKLRSGDRSMVEVLADHPGELVRTDSPNFLCSVLPTHWRCNKTLPIAFKVVALGDVPDGTLVTVMAGNDENYSAELRNATAAMKNQVARFNDLRFVGRSGRGKSFTLTITVFTNPPQVATYHRAIKITVDGPREPRRHRQKLDDQTKPGSLSFSERLSELEQLRRTAMRVSPHHPAPTPNPRASLNHSTAFNPQPQSQMQDTRQIQPSPPWSYDQSYQYLGSIASPSVHPATPISPGRASGMTTLSAELSSRLSTAPDLTAFSDPRQFPALPSISDPRMHYPGAFTYSPTPVTSGIGIGMSAMGSATRYHTYLPPPYPGSSQAQGGPFQASSPSYHLYYGASAGSYQFSMVGGERSPPRILPPCTNASTGSALLNPSLPNQSDVVEAEGSHSNSPTNMAPSARLEEAVWRPY

SEQ ID NO: 25 - protein, 187 aa, Homo sapiens [sequence omitted]

SEQ ID NO: 26 - protein, 382 aa, Homo sapiens
MTEFWLISAPGEKTCQQTWEKLHAATSKNNNLAVTSKFNIPDLKVGTLDVLVGLSDELAKLDAFVEGVVKKVAQYMADVLEDSKDKVQENLLANGVDLVTYITRFQWDMAKYPIKQSLKNISEIIAKGVTQIDNDLKSRASAYNNLKGNLQNLERKNAGSLLTRSLAEIVKKDDFVLDSEYLVTLLVVVPKLNHNDWIKQYETLAEMVVPRSSNVLSEDQDSYLCNVTLFRKAVDDFRHKARENKFIVRDFQYNEEEMKADKEEMNRLSTDKKKQFGPLVRWLKVNFSEAFIAWIHVKALRVFVESVLRYGLPVNFQAMLLQPNKKTLKKLREVLHELYKHLDSSAAAIIDAPMDIPGLNLSQQEYYPYVYYKIDCNLLEFK

SEQ ID NO: 27 - protein, 183 aa, Homo sapiens
MREYKVVVLGSGGVGKSALTVQFVTGTFIEKYDPTIEDFYRKEIEVDSSPSVLEILDTAGTEQFASMRDLYIKNGQGFILVYSLVNQQSFQDIKPMRDQIIRVKRYEKVPVILVGNKVDLESEREVSSSEGRALAEEWGCPFMETSAKSKTMVDELFAEIVRQMNYAAQPDKDDPCCSACNIQ

SEQ ID NO: 28 - protein, 149 aa, Homo sapiens [sequence omitted]

SEQ ID NO: 29 - protein, 1602 aa, Homo sapiens
MVDASGRAAAEGWRKMEAPPDGAADLVPLDRYDAARAKIAANLQWICAKAYGRDNIPEDLRDPFYVDQYEQEHIKPPVIKLLLSSELYCRVCSLILKGDQVAALQGHQSVIQALSRKGIYVMESDDTPVTESDLSRAPIKMSAHMAMVDALMMAYTVEMISIEKVVASVKRFSTFSASKELPYDLEDAMVFWINKVNLKMREITEKEVKLKQQLLESPAHQKVRYRREHLSARQSPYFPLLEDLMRDGSDGAALLAVIHYYCPEQMKLDDICLKEVTSMADSLYNIRLLREFSNEYLNKCFYLTLEDMLYAPLVLKPNVMVFIAELFWWFENVKPDFVQPRDVQELKDAKTVLHQKSSRPPVPISNATKRSFLGSPAAGTLAELQPPVQLPAEGCHRHYLHPEEPEYLGKGTAAFSPSHPLLPLRQKQQKSIQGEDIPDQRHRSNSLTRVDGQPRGAAIAWPEKKTRPASQPTPFALHHAASCEVDPSSGDSISLARSISKDSLASNIVNLTPQNQPHPTATKSHGKSLLSNVSIEDEEEELVAIVRADVVPQQADPEFPRASPRALGLTANARSPQGQLDTSESKPDSFFLEPLMPAVLKPAKEKQVITKEDERGEGRPRSIVSRRPSEGPQPLVRRKMTGSRDLNRTFTPIPCSEFPMGIDPTETGPLSVETAGEVCGGPLALGGFDPFPQGPSTDGFFLHVGRADEDTEGRLYVSCSKSPNSHDSEPWTLLRQDSDSDVVDIEEAEHDFMGEAHPVVFSRYIGEEESAKLQEDMKVKEHEDKDDASGRSSPCLSTASQMSSVSMASGSVKMTSFAERKLQRLNSCETKSSTSSSQKTTPDASESCPAPLTTWRQKREQSPSQHGKDPASLLASELVQLHMQLEEKRRAIEAQKKKMEALSARQRLKLGKAAFLHVVKKGKAEAAPPLRPEHFAKEYSQHNGEDCGDAVSKTEDFLVKEEQREELLHEPQDVDKESLAFAQQHKAKDPVALHELERNKVISAALLEDTVGEVVDVNECDLSIEKLNETISTLQQAILKISQQQEQLLMKSPTVPVPGSKNNSQDHKVKAPVHFVEPLSPTGVAGHRKAPRLGQGRNSRSGRPAELKVPKDRPQGSSRSKTPTPSVETLPHLRPFPASSHPRTPTDPGLDSALEPSGDPHGKCLFDSYRLHDESNQRTLTLSSSKDANILSEQMSLKEVLDASVKEVGSSSSDVSGKESVPVEEPLRSRASLIEVDLSDLKAPDEDGELVSLDGSADLVSEGDQKPGVGFFFKDEQKAEDELAKKRAAFLLKQQRKAEEARVRKQQLEAEVELKRDEARRKAEEDRVRKEEEKARRELIKQEYLRRKQQQILEEQGLGKPKSKPKKPRPKSVHREESCSDSGTKCSSTPDNLSRTQSGSSLSLASAATTEPESVHSGGTPSQRVESMEALPILSRNPSRSTDRDWETASAASSLASVAEYTGPKLFKEPSSKSNKPIIHNAISHCCLAGKVNEPHKNSILEELEKCDANHYIILFRDAGCQFRALYCYYPDTEEIYKLTGTGPKNITKKMIDKLYKYSSDRKQFNLIPAKTMSVSVDALTIHNHLWQPKRPAVPKKAQTRK

SEQ ID NO: 30 - protein, 167 aa, Homo sapiens
MSLALRSELVVDKTKRKKRRELSEEQKQEIKDAFELFDTDKDEAIDYHELKVAMRALGFDVKKADVLKILKDYDREATGKITFEDFNEVVTDWILERDPHEEILKAFKLFDDDDSGKISLRNLRRVARELGENMSDEELRAMIEEFDKDGDGEINQEEFIAIMTGDI

SEQ ID NO: 31 - protein, 612 aa, Homo sapiens
MATAATIPSVATATAAALGEVEDEGLLASLFRDRFPEAQWRERPDVGRYLRELSGSGLERLRREPERLAEERAQLLQQTRDLAFANYKTFIRGAECTERIHRLFGDVEASLGRLLDRLPSFQQSCRNFVKEAEEISSNRRMNSLTLNRHTEILEILEIPQLMDTCVRNSYYEEALELAAYVRRLERKYSSIPVIQGIVNEVRQSMQLMLSQLIQQLRTNIQLPACLRVIGYLRRMDVFTEAELRVKFLQARDAWLRSILTAIPNDDPYFHITKTIEASRVHLFDIITQYRAIFSDEDPLLPPAMGEHTVNESAIFHGWVLQKVSQFLQVLETDLYRGIGGHLDSLLGQCMYFGLSFSRVGADFRGQLAPVFQRVAISTFQKAIQETVEKFQEEMNSYMLISAPAILGTSNMPAAVPATQPGTLQPPMVLLDFPPLACFLNNILVAFNDLRLCCPVALAQDVTGALEDALAKVTKIILAFHRAEEAAFSSGEQELFVQFCTVFLEDLVPYLNRCLQVLFPPAQIAQTLGIPPTQLSKYGNLGHVNIGAIQEPLAFILPKRETLFTLDDQALGPELTAPAPEPPAEEPRLEPAGPACPEGGRAETQAEPPSVGP

SEQ ID NO: 32 - protein, 328 aa, Homo sapiens
MRPVRLMKVFVTRRIPAEGRVALARAADCEVEQWDSDEPIPAKELERGVAGAHGLLCLLSDHVDKRILDAAGANLKVISTMSVGIDHLALDEIKKRGIRVGYTPDVLTDTTAELAVSLLLTTCRRLPEAIEEVKNGGWTSWKPLWLCGYGLTQSTVGIIGLGRIGQAIARRLKPFGVQRFLYTGRQPRPEEAAEFQAEFVSTPELAAQSDFIVVACSLTPATEGLCNKDFFQKMKETAVFINISRGDVVNQDDLYQALASGKIAAAGLDVTSPEPLPTNHPLLTLKNCVILPHIGSATHRTRNTMSLLAANNLLAGLRGEPMPSELKL

SEQ ID NO: 33 - protein, 838 aa, Homo sapiens
MPAERPAGSGGSEAPAMVEQLDTAVITPAMLEEEEQLEAAGLERERKMLEKARMSWDRESTEIRYRRLQHLLEKSNIYSKFLLTKMEQQQLEEQKKKEKLERKKESLKVKKGKNSIDASEEKPVMRKKRGREDESYNISEVMSKEEILSVAKKNKKENEDENSSSTNLCVEDLQKNKDSNSIIKDRLSETVRQNTKFFFDPVRKCNGQPVPFQQPKHFTGGVMRWYQVEGMEWLRMLWENGINGILADEMGLGKTVQCIATIALMIQRGVPGPFLVCGPLSTLPNWMAEFKRFTPDIPTMLYHGTQEERQKLVRNIYKRKGTLQIHPVVITSFEIAMRDRNALQHCYWKYLIVDEGHRIKNMKCRLIRELKRFNADNKLLLTGTPLQNNLSELWSLLNFLLPDVFDDLKSFESWFDITSLSETAEDIIAKEREQNVLHMLHQILTPFLLRRLKSDVALEVPPKREVVVYAPLSKKQEIFYTAIVNRTIANMFGSSEKETIELSPTGRPKRRTRKSINYSKIDDFPNELEKLISQIQPEVDRERAVVEVNIPVESEVNLKLQNIMMLLRKCCNHPYLIEYPIDPVTQEFKIDEELVTNSGKFLILDRMLPELKKRGHKVLLFSQMTSMLDILMDYCHLRDFNFSRLDGSMSYSEREKNMHSFNTDPEVFIFLVSTRAGGLGINLTAADTVIIYDSDWNPQSDLQAQDRCHRIGQTKPVVVYRLVTANTIDQKIVERAAAKRKLEKLIIHKNHFKGGQSGLNLSKNFLDPKELMELLKSRDYEREIKGSREKVISDKDLELLLDRSDLIDQMNASGPIKEKMGIFKILENSEDSSPECLF

SEQ ID NO: 34 - protein, 1690 aa, Homo sapiens
MAGVGPGGYAAEFVPPPECPVFEPSWEEFTDPLSFIGRIRPLAEKTGICKIRPPKDWQPPFACEVKSFRFTPRVQRLNELEAMTRVRLDFLDQLAKFWELQGSTLKIPVVERKILDLYALSKIVASKGGFEMVTKEKKWSKVGSRLGYLPGKGTGSLLKSHYERILYPYELFQSGVSLMGVQMPNLDLKEKVEPEVLSTDTQTSPEPGTRMNILPKRTRRVKTQSESGDVSRNTELKKLQIFGAGPKVVGLAMGTKDKEDEVTRRRKVTNRSDAFNMQMRQRKGTLSVNFVDLYVCMFCGRGNNEDKLLLCDGCDDSYHTFCLIPPLPDVPKGDWRCPKCVAEECSKPREAFGFEQAVREYTLQSFGEMADNFKSDYFNMPVHMVPTELVEKEFWRLVSSIEEDVIVEYGADISSKDFGSGFPVKDGRRKILPEEEEYALSGWNLNNMPVLEQSVLAHINVDISGMKVPWLYVGMCFSSFCWHIEDHWSYSINYLHWGEPKTWYGVPSHAAEQLEEVMRELAPELFESQPDLLHQLVTIMNPNVLMEHGVPVYRTNQCAGEFVVTFPRAYHSGFNQGYNFAEAVNFCTADWLPIGRQCVNHYRRLRRHCVFSHEELIFKMAADPECLDVGLAAMVCKELTLMTEEETRLRESVVQMGVLMSEEEVFELVPDDERQCSACRTTCFLSALTCSCNPERLVCLYHPTDLCPCPMQKKCLRYRYPLEDLPSLLYGVKVRAQSYDTWVSRVTEALSANFNHKKDLIELRVMLEDAEDRKYPENDLFRKLRDAVKEAETCASVAQLLLSKKQKHRQSPDSGRTRTKLTVEELKAFVQQLFSLPCVISQARQVKNLLDDVEEFHERAQEAMMDETPDSSKLQMLIDMGSSLYVELPELPRLKQELQQARWLDEVRLTLSDPQQVTLDVMKKLIDSGVGLAPHHAVEKAMAELQELLTVSERWEEKAKVCLQARPRHSVASLESIVNEAKNIPAFLPNVLSLKEALQKAREWTAKVEAIQSGSNYAYLEQLESLSAKGRPIPVRLEALPQVESQVAAARAWRERTGRTFLKKNSSHTLLQVLSPRTDIGVYGSGKNRRKKVKELIEKEKEKDLDLEPLSDLEEGLEETRDTAMVVAVFKEREQKEIEAMHSLRAANLAKMTMVDRIEEVKFCICRKTASGFMLQCELCKDWFHNSCVPLPKSSSQKKGSSWQAKEVKFLCPLCMRSRRPRLETILSLLVSLQKLPVRLPEGEALQCLTERAMSWQDRARQALATDELSSALAKLSVLSQRMVEQAAREKTEKIISAELQKAAANPDLQGHLPSFQQSAFNRVVSSVSSSPRQTMDYDDEETDSDEDIRETYGYDMKDTASVKSSSSLEPNLFCDEEIPIKSEEVVTHMWTAPSFCAEHAYSSASKSCSQGSSTPRKQPRKSPLVPRSLEPPVLELSPGAKAQLEELMMVGDLLEVSLDETQHIWRILQATHPPSEDRFLHIMEDDSMEEKPLKVKGKDSSEKKRKRKLEKVEQLFGEGKQKSKELKKMDKPRKKKLKLGADKSKELNKLAKKLAKEEERKKKKEKAAAAKVELVKESTEKKREKKVLDIPSKYDWSGAEESDDENAVCAAQNCQRPCKDKVDWVQCDGGCDEWFHQVCVGVSPEMAENEDYICINCAKKQGPVSPGPAPPPSFIMSYKLPMEDLKETS

SEQ ID NO: 35 - protein, 417 aa, Homo sapiens
MSLSNKLTLDKLDVKGKRVVMRVDFNVPMKNNQITNNQRIKAAVPSIKFCLDNGAKSVVLMSHLGRPDGVPMPDKYSLEPVAVELKSLLGKDVLFLKDCVGPEVEKACANPAAGSVILLENLRFHVEEEGKGKDASGNKVKAEPAKIEAFRASLSKLGDVYVNDAFGTAHRAHSSMVGVNLPQKAGGFLMKKELNYFAKALESPERPFLAILGGAKVADKIQLINNMLDKVNEMIIGGGMAFTFLKVLNNMEIGTSLFDEEGAKIVKDLMSKAEKNGVKITLPVDFVTADKFDENAKTGQATVASGIPAGWMGLDCGPESSKKYAEAVTRAKQIVWNGPVGVFEWEAFARGTKALMDEVVKATSRGCITIIGGGDTATCCAKWNTEDKVSHVSTGGGASLELLEGKVLPGVDALSNI

SEQ ID NO: 36 - protein, 1693 aa, Homo sapiens
MADLEVYKNLSPEKVERCMSVMQSGTQMIKLKRGTKGLVRLFYLDEHRTRLRWRPSRKSEKAKILIDSIYKVTEGRQSEIFHRQAEGNFDPSCCFTIYHGNHMESLDLITSNPEEARTWITGLKYLMAGISDEDSLAKRQRTHDQWVKQTFEEADKNGDGLLNIEEIHQLMHKLNVNLPRRKVRQMFQEADTDENQGTLTFEEFCVFYKMMSLRRDLYLLLLSYSDKKDHLTVEELAQFLKVEQKMNNVTTDYCLDIIKKFEVSEENKVKNVLGIEGFTNFMRSPACDIFNPLHHEVYQDMDQPLCNYYIASSHNTYLTGDQLLSQSKVDMYARVLQEGCRCVEVDCWDGPDGEPVVHHGYTLTSKILFRDVVETINKHAFVKNEFPVILSIENHCSIQQQRKIAQYLKGIFGDKLDLSSVDTGECKQLPSPQSLKGKILVKGKKLPYHLGDDAEEGEVSDEDSADEIEDECKFKLHYSNGTTEHQVESFIRKKLESLLKESQIRDKEDPDSFTVRALLKATHEGLNAHLKQSPDVKESGKKSHGRSLMTNFGKHKKTTKSRSKSYSTDDEEDTQQSTGKEGGQLYRLGRRRKTMKLCRELSDLVVYTNSVAAQDIVDDGTTGNVLSFSETRAHQVVQQKSEQFMIYNQKQLTRIYPSAYRIDSSNFNPLPYWNAGCQLVALNYQSEGRMMQLNRAKFKANGNCGYVLKPQQMCKGTFNPFSGDPLPANPKKQLILKVISGQQLPKPPDSMFGDRGEIIDPFVEVEIIGLPVDCCKDQTRVVDDNGFNPVWEETLTFTVHMPEIALVRFLVWDHDPIGRDFVGQRTVTFSSLVPGYRHVYLEGLTEASIFVHITINEIYGKWSPLILNPSYTILHFLGATKNRQLQGLKGLFNKNPRHSSSENNSHYVRKRSIGDRILRRTASAPAKGRKKSKMGFQEMVEIKDSVSEATRDQDGVLRRTTRSLQARPVSMPVDRNLLGALSLPVSETAKDIEGKENSLAEDKDGRRKGKASIKDPHFLNFNKKLSSSSSALLHKDTSQGDTIVSTAHMSVTGEQLGMSSPRGGRTTSNATSNCQENPCPSKSLSPKQHLAPDPVVNPTQDLHGVKIKEKGNPEDFVEGKSILSGSVLSHSNLEIKNLEGNRGKGRAATSFSLSDVSMLCSDIPDLHSTAILQESVISHLIDNVTLTNENEPGSSISALIGQFDETNNQALTVVSHLHNTSVMSGHCPLPSLGLKMPIKHGFCKGKSKSSFLCSSPELIALSSSETTKHATNTVYETTCTPISKTKPDDDLSSKAKTAALESNLPGSPNTSRGWLPKSPTKGEDWETLKSCSPASSPDLTLEDVIADPTLCFNSGESSLVEIDGESENLSLTTCEYRREGTSQLASPLKLKYNQGVVEHFQRGLRNGYCKETLRPSVPEIFNNIQDVKTQSISYLAYQGAGFVHNHFSDSDAKMFQTCVPQQSSAQDMHVPVPKQLAHLPLPALKLPSPCKSKSLGDLTSEDIACNFESKYQCISKSFVTTGIRDKKGVTVKTKSLEPIDALTEQLRKLVSFDQEDNCQVLYSKQDANQLPRALVRKLSSRSQSRVRNIASRAKEKQEANKQKVPNPSNGAGVVLRNKPSAPTPAVNRHSTGSYIAGYLKNTKGGGLEGRGIPEGACTALHYGHVDQFCSDNSVLQTEPSSDDKPEIYFLLRL

SEQ ID NO: 37 - protein, 134 aa, Homo sapiens
MGRSRRTGAHRAHSLARQMKAKRRRPDLDEIHRELRPQGSARPQPDPNAEFDPDLPGGGLHRCLACARYFIDSTNLKTHFRSKDHKKRLKQLSVEPYSQEEAERAAGMGSYVPPRRLAVPTEVSTEVPEMDTST

SEQ ID NO: 38 - protein, 459 aa, Homo sapiens
MAPLCPSPWLPLLIPAPAPGLTVQLLLSLLLLVPVHPQRLPRMQEDSPLGGGSSGEDDPLGEEDLPSEEDSPREEDPPGEEDLPGEEDLPGEEDLPEVKPKSEEEGSLKLEDLPTVEAPGDPQEPQNNAHRDKEGDDQSHWRYGGDPPWPRVSPACAGRFQSPVDIRPQLAAFCPALRPLELLGFQLPPLPELRLRNNGHSVQLTLPPGLEMALGPGREYRALQLHLHWGAAGRPGSEHTVEGHRFPAEIHVVHLSTAFARVDEALGRPGGLAVLAAFLEEGPEENSAYEQLLSRLEEIAEEGSETQVPGLDISALLPSDFSRYFQYEGSLTTPPCAQGVIWTVFNQTVMLSAKQLHTLSDTLWGPGDSRLQLNFRATQPLNGRVIEASFPAGVDSSPRAAEPVQLNSCLAAGDILALVFGLLFAVTSVAFLVQMRRQHRRGTKGGVSYRPAEVAETGA

SEQ ID NO: 39 - protein, 464 aa, Homo sapiens
MSSRSTKDLIKSKWGSKPSNSKSETTLEKLKGEIAHLKTSVDEITSGKGKLTDKERHRLLEKIRVLEAEKEKNAYQLTEKDKEIQRLRDQLKARYSTTTLLEQLEETTREGERREQVLKALSEEKDVLKQQLSAATSRIAELESKTNTLRLSQTVAPNCFNSSINNIHEMEIQLKDALEKNQQWLVYDQQREVYVKGLLAKIFELEKKTETAAHSLPQQTKKPESEGYLQEEKQKCYNDLLASAKKDLEVERQTITQLSFELSEFRRKYEETQKEVHNLNQLLYSQRRADVQHLEDDRHKTEKIQKLREENDIARGKLEEEKKRSEELLSQVQFLYTSLLKQQEEQTRVALLEQQMQACTLDFENEKLDRQHVQHQLHVILKELRKARNQITQLESLKQLHEFAITEPLVTFQGETENREKVAASPKSPTAALNESLVECPKCNIQYPATEHRDLLVHVEYCSK

SEQ ID NO: 40 - protein, 299 aa, Homo sapiens
MEEFDSEDFSTSEEDEDYVPSGGEYSEDDVNELVKEDEVDGEEQTQKTQGKKRKAQSIPARKRRQGGLSLEEEEEEDANSESEGSSSEEEDDAAEQEKGIGSEDARKKKEDELWASFLNDVGPKSKVPPSTQVKKGEETEETSSSKLLVKAEELEKPKETEKVKITKVFDFAGEEVRVTKEVDATSKEAKSFFKQNEKEKPQANVPSALPSLPAGSGLKRSSGMSSLLGKIGAKKQKMSTLEKSKLDWESFKEEEGIGEELAIHNRGKEGYIERKAFLDRVDHRQFEIERDLRLSKMKP

SEQ ID NO: 41 - protein, 363 aa, Homo sapiens
MQAFLKGTSISTKPPLTKDRGVAASAGSSGENKKAKPVPWVEKYRPKCVDEVAFQEEVVAVLKKSLEGADLPNLLFYGPPGTGKTSTILAAARELFGPELFRLRVLELNASDERGIQVVREKVKNFAQLTVSGSRSDGKPCPPFKIVILDEADSMTSAAQAALRRTMEKESKTTRFCLICNYVSRIIEPLTSRCSKFRFKPLSDKIQQQRLLDIAKKENVKISDEGIAYLVKVSEGDLRKAITFLQSATRLTGGKEITEKVITDIAGVIPAEKIDGVFAACQSGSFDKLEAVVKDLIDEGHAATQLVNQLHDVVVENNLSDKQKSIITEKLAEVDKCLADGADEHLQLISLCATVMQQLSQNC

SEQ ID NO: 42 - protein, 1199 aa, Homo sapiens
MPLTGVEPARMNRKKGDKGFESPRPYKLTHQVVCINNINFQRKSVVGFVELTIFPTVANLNRIKLNSKQCRIYRVRINDLEAAFIYNDPTLEVCHSESKQRNLNYFSNAYAAAVSAVDPDAGNGELCIKVPSELWKHVDELKVLKIHINFSLDQPKGGLHFVVPSVEGSMAERGAHVFSCGYQNSTRFWFPCVDSYSELCTWKLEFTVDAAMVAVSNGDLVETVYTHDMRKKTFHYMLTIPTAASNISLAIGPFEILVDPYMHEVTHFCLPQLLPLLKHTTSYLHEVFEFYEEILTCRYPYSCFKTVFIDEAYVEVAAYASMSIFSTNLLHSAMIIDETPLTRRCLAQSLAQQFFGCFISRMSWSDEWVLKGISGYIYGLWMKKTFGVNEYRHWIKEELDKIVAYELKTGGVLLHPIFGGGKEKDNPASHLHFSIKHPHTLSWEYYSMFQCKAHLVMRLIENRISMEFMLQVFNKLLSLASTASSQKFQSHMWSQMLVSTSGFLKSISNVSGKDIQPLIKQWVDQSGVVKFYGSFAFNRKRNVLELEIKQDYTSPGTQKYVGPLKVTVQELDGSFNHTLQIEENSLKHDIPCHSKSRRNKKKKIPLMNGEEVDMDLSAMDADSPLLWIRIDPDMSVLRKVEFEQADFMWQYQLRYERDVVAQQESILALEKFPTPASRLALTDILEQEQCFYRVRMSACFCLAKIANSMVSTWTGPPAMKSLFTRMFCCKSCPNIVKTNNFMSFQSYFLQKTMPVAMALLRDVHNLCPKEVLTFILDLIKYNDNRKNKFSDNYYRAEMIDALANSVTPAVSVNNEVRTLDNLNPDVRLILEEITRFLNMEKLLPSYRHTITVSCLRAIRVLQKNGHVPSDPALFKSYAEYGHFVDIRIAALEAVVDYTKVDRSYEELQWLLNMIQNDPVPYVRHKILNMLTKNPPFTKNMESPLCNEALVDQLWKLMNSGTSHDWRLRCGAVDLYFTLFGLSRPSCLPLPELGLVLNLKEKKAVLNPTIIPESVAGNQEAANNPSSHPQLVGFQNPFSSSQDEEEIDMDTVHDSQAFISHHLNMLERPSTPGLSKYRPASSRSALIPQHSAGCDSTPTTKPQWSLELARKGTGKEQAPLEMSMHPAASAPLSVFTKESTASKHSDHHHHHHHEHKKKKKKHKHKHKHKHKHDSKEKDKEPFTFSSPASGRSIRSPSLSD

SEQ ID NO: 43 - protein, 221 aa, Homo sapiens
MFHGIPATPGIGAPGNKPELYEEVKLYKNAREREKYDNMAELFAVVKTMQALEKAYIKDCVSPSEYTAACSRLLVQYKAAFRQVQGSEISSIDEFCRKFRLDCPLAMERIKEDRPITIKDDKGNLNRCIADVVSLFITVMDKLRLEIRAMDEIQPDLRELMETMHRMSHLPPDFEGRQTVSQWLQTLSGMSASDELDDSQVRQMLFDLESAYNAFNRFLHA

SEQ ID NO: 44 - protein, 1217 aa, Homo sapiens
MFLYNLTLQRATGISFAIHGNFSGTKQQEIVVSRGKILELLRPDPNTGKVHTLLTVEVFGVIRSLMAFRLTGGTKDYIVVGSDSGRIVILEYQPSKNMFEKIHQETFGKSGCRRIVPGQFLAVDPKGRAVMISAIEKQKLVYILNRDAAARLTISSPLEAHKANTLVYHVVGVDVGFENPMFACLEMDYEEADNDPTGEAAANTQQTLTFYELDLGLNHVVRKYSEPLEEHGNFLITVPGGSDGPSGVLICSENYITYKNFGDQPDIRCPIPRRRNDLDDPERGMIFVCSATHKTKSMFFFLAQTEQGDIFKITLETDEDMVTEIRLKYFDTVPVAAAMCVLKTGFLFVASEFGNHYLYQIAHLGDDDEEPEFSSAMPLEEGDTFFFQPRPLKNLVLVDELDSLSPILFCQIADLANEDTPQLYVACGRGPRSSLRVLRHGLEVSEMAVSELPGNPNAVWTVRRHIEDEFDAYIIVSFVNATLVLSIGETVEEVTDSGFLGTTPTLSCSLLGDDALVQVYPDGIRHIRADKRVNEWKTPGKKTIVKCAVNQRQVVIALTGGELVYFEMDPSGQLNEYTERKEMSADVVCMSLANVPPGEQRSRFLAVGLVDNTVRIISLDPSDCLQPLSMQALPAQPESLCIVEMGGTEKQDELGERGSIGFLYLNIGLQNGVLLRTVLDPVTGDLSDTRTRYLGSRPVKLFRVRMQGQEAVLAMSSRSWLSYSYQSRFHLTPLSYETLEFASGFASEQCPEGIVAISTNTLRILALEKLGAVFNQVAFPLQYTPRKFVIHPESNNLIIIETDHNAYTEATKAQRKQQMAEEMVEAAGEDERELAAEMAAAFLNENLPESIFGAPKAGNGQWASVIRVMNPIQGNTLDLVQLEQNEAAFSVAVCRFSNTGEDWYVLVGVAKDLILNPRSVAGGFVYTYKLVNNGEKLEFLHKTPVEEVPAAIAPFQGRVLIGVGKLLRVYDLGKKKLLRKCENKHIANYISGIQTIGHRVIVSDVQESFIWVRYKRNENQLIIFADDTYPRWVTTASLLDYDTVAGADKFGNICVVRLPPNTNDEVDEDPTGNKALWDRGLLNGASQKAEVIMNYHVGETVLSLQKTTLIPGGSESLVYTTLSGGIGILVPFTSHEDHDFFQHVEMHLRSEHPPLCGRDHLSFRSYYFPVKNVIDGDLCEQFNSMEPNKQKNVSEELDRTPPEVSKKLEDIRTRYAF

SEQ ID NO: 45 - protein, 523 aa, Homo sapiens
MNQPCNSMEPRVMDDDMLKLAVGDQGPQEEAGQLAKQEGILFKDVLSLQLDFRNILRIDNLWQFENLRKLQLDNNIIEKIEGLENLAHLVWLDLSFNNIETIEGLDTLVNLEDLSLFNNRISKIDSLDALVKLQVLSLGNNRIDNMMNIIYLRRFKCLRTLSLSRNPISEAEDYKMFICAYLPDLMYLDYRRIDDHTKKLAEAKHQYSIDELKHQENLMQAQLEDEQAQREELEKHKTAFVEHLNGSFLFDSMYAEDSEGNNLSYLPGVGELLETYKDKFVIICVNIFEYGLKQQEKRKTELDTFSECVREAIQENQEQGKRKIAKFEEKHLSSLSAIREELELPNIEKMILECSADISELFDALMTLEMQLVEQLEETINMFERNIVDMVGLFIENVQSLMAQCRDLENHHHEKLLEISISTLEKIVEGDLDEDLPNDLRALFVDKDTIVNAVGASHDIHLLKIDNREDELVTRINSWCTRLIDRIHKDEIMRNRKRVKEINQYIDHMQSELDNLECGDILD

SEQ ID NO: 46 - protein, 717 aa, Homo sapiens
MATPAAVNPPEMASDIPGSVTLPVAPMAATGQVRMAGAMPARGGKRRSGMDFDDEDGEGPSKFSRENHSEIERRRRNKMTQYITELSDMVPTCSALARKPDKLTILRMAVSHMKSMRGTGNKSTDGAYKPSFLTEQELKHLILEAADGFLFVVAAETGRVIYVSDSVTPVLNQPQSEWFGSTLYEQVHPDDVEKLREQLCTSENSMTGRILDLKTGTVKKEGQQSSMRMCMGSRRSFICRMRCGNAPLDHLPLNRITTMRKRFRNGLGPVKEGEAQYAVVHCTGYIKAWPPAGMTIPEEDADVGQGSKYCLVAIGRLQVTSSPVCMDMNGMSVPTEFLSRHNSDGIITFVDPRCISVIGYQPQDLLGKDILEFCHPEDQSHLRESFQQVVKLKGQVLSVMYRFRTKNREWMLIRTSSFTFQNPYSDEIEYIICTNTNVKQLQQQQAELEVHQRDGLSSYDLSQVPVPNLPAGVHEAGKSVEKADAIFSQERDPRFAEMFAGISASEKKMMSSASAAGTQQIYSQGSPFPSGHSGKAFSSSVVHVPGVNDIQSSSSTGQNMSQISRQLNQSQVAWTGSRPPFPGQQIPSQSSKTQSSPFGIGTSHTYPADPSSYSPLSSPATSSPSGNAYSSLANRTPGFAESGQSSGQFQGRPSEVWSQWQSQHHGQQSGEQHSHQQPGQTEVFQDMLPMPGDPTQGTGNYNIEDFADLGMFPPFSE

SEQ ID NO: 47 - protein, 1141 aa, Homo sapiens
MPEPTKKEENEVPAPAPPPEEPSKEKEAGTTPAKDWTLVETPPGEEQAKQNANSQLSILFIEKPQGGTVKVGEDITFIAKVKAEDLLRKPTIKWFKGKWMDLASKAGKHLQLKETFERHSRVYTFEMQIIKAKDNFAGNYRCEVTYKDKFDSCSFDLEVHESTGTTPNIDIRSAFKRSGEGQEDAGELDFSGLLKRREVKQQEEEPQVDVWELLKNAKPSEYEKIAFQYGITDLRGMLKRLKRMRREEKKSAAFAKILDPAYQVDKGGRVRFVVELADPKLEVKWYKNGQEIRPSTKYIFEHKGCQRILFINNCQMTDDSEYYVTAGDEKCSTELFVREPPIMVTKQLEDTTAYCGERVELECEVSEDDANVKWFKNGEEIIPGPKSRYRIRVEGKKHILIIEGATKADAAEYSVMTTGGQSSAKLSVDLKPLKILTPLTDQTVNLGKEICLKCEISENIPGKWTKNGLPVQESDRLKVVHKGRIHKLVIANALTEDEGDYVFAPDAYNVTLPAKVHVIDPPKIILDGLDADNTVTVIAGNKLRLEIPISGEPPPKAMWSRGDKAIMEGSGRIRTESYPDSSTLVIDIAERDDSGVYHINLKNEAGEAHASIKVKVVDFPDPPVAPTVTEVGDDWCIMNWEPPAYDGGSPILGYFIERKKKQSSRWMRLNFDLCKETTFEPKKMIEGVAYEVRIFAVNAIGISKPSMPSRPFVPLAVTSPPTLLTVDSVTDTTVTMRWRPPDHIGAAGLDGYVLEYCFEGSTSAKQSDENGEAAYDLPAEDWIVANKDLIDKTKFTITGLPTDAKIFVRVKAVNAAGASEPKYYSQPILVKEIIEPPKIRIPRHLKQTYIRRVGEAVNLVIPFQGKPRPELTWKKDGAEIDKNQINIRNSETDTIIFIRKAERSHSGKYDLQVKVDKFVETASIDIQIIDRPGPPQIVKIEDVWGENVALTWTPPKDDGNAAITGYTIQKADKKSMEWFTVIEHYHRTSATITELVIGNEYYFRVFSENMCGLSEDATMTKESAVIARDGKIYKNPVYEDFDFSEAPMFTQPLVNTYAIAGYNATLNCSVRGNPKPKITWMKNKVAIVDDPRYRMFSNQGVCTLEIRKPSPYDGGTYCCKAVNDLGTVEIECKLEVKVIAQ

SEQ ID NO: 48 - protein, 332 aa, Homo sapiens
MLLETQDALYVALELVIAALSVAGNVLVCAAVGTANTLQTPTNYFLVSLAAADVAVGLFAIPFAITISLGFCTDFYGCLFLACFVLVLTQSSIFSLLAVAVDRYLAICVPLRYKSLVTGTRARGVIAVLWVLAFGIGLTPFLGWNSKDSATNNCTEPWDGTTNESCCLVKCLFENVVPMSYMVYFNFFGCVLPPLLIMLVIYIKIFLVACRQLQRTELMDHSRTTLQREIHAAKSLAMIVGIFALCWLPVHAVNCVTLFQPAQGKNKPKWAMNMAILLSHANSVVNPIVYAYRNRDFRYTFHKIISRYLLCQADVKSGNGQAGVQPALGVGL

SEQ ID NO: 49 - protein, 420 aa, Homo sapiens
MSGRPRTTSFAESCKPVQQPSAFGSMKVSRDKDGSKVTTVVATPGQGPDRPQEVSYTDTKVIGNGSFGVVYQAKLCDSGELVAIKKVLQDKRFKNRELQIMRKLDHCNIVRLRYFFYSSGEKKDEVYLNLVLDYVPETVYRVARHYSRAKQTLPVIYVKLYMYQLFRSLAYIHSFGICHRDIKPQNLLLDPDTAVLKLCDFGSAKQLVRGEPNVSYICSRYYRAPELIFGATDYTSSIDVWSAGCVLAELLLGQPIFPGDSGVDQLVEIIKVLGTPTREQIREMNPNYTEFKFPQIKAHPWTKVFRPRTPPEAIALCSRLLEYTPTARLTPLEACAHSFFDELRDPNVKLPNGRDTPALFNFTTQELSSNPPLATILIPPHARIQAAASTPTNATAASDANTGDRGQTNNAASASASNST

SEQ ID NO: 50 - protein, 1823 aa, Homo sapiens
MALSSAWRSVLPLWLLWSAACSRAASGDDNAFPFDIEGSSAVGRQDPPETSEPRVALGRLPPAAEKCNAGFFHTLSGECVPCDCNGNSNECLDGSGYCVHCQRNTTGEHCEKCLDGYIGDSIRGAPQFCQPCPCPLPHLANFAESCYRKNGAVRCICNENYAGPNCERCAPGYYGNPLLIGSTCKKCDCSGNSDPNLIFEDCDEVTGQCRNCLRNTTGFKCERCAPGYYGDARIAKNCAVCNCGGGPCDSVTGECLEEGFEPPTGMDCPTISCDKCVWDLTDALRLAALSIEEGKSGVLSVSSGAAAHRHVNEINATIYLLKTKLSERENQYALRKIQINNAENTMKSLLSDVEELVEKENQASRKGQLVQKESMDTINHASQLVEQAHDMRDKIQEINNKMLYYGEEHELSPKEISEKLVLAQKMLEEIRSRQPFFTQRELVDEEADEAYELLSQAESWQRLHNETRTLFPVVLEQLDDYNAKLSDLQEALDQALNYVRDAEDMNRATAARQRDHEKQQERVREQMEVVNMSLSTSADSLTTPRLTLSELDDIIKNASGIYAEIDGAKSELQVKLSNLSNLSHDLVQEAIDHAQDLQQEANELSRKLHSSDMNGLVQKALDASNVYENIVNYVSEANETAEFALNTTDRIYDAVSGIDTQIIYHKDESENLLNQARELQAKAESSSDEAVADTSRRVGGALARKSALKTRLSDAVKQLQAAERGDAQQRLGQSRLITEEANRTTMEVQQATAPMANNLTNWSQNLQHFDSSAYNTAVNSARDAVRNLTEVVPQLLDQLRTVEQKRPASNVSASIQRIRELIAQTRSVASKIQVSMMFDGQSAVEVHSRTSMDDLKAFTSLSLYMKPPVKRPELTETADQFILYLGSKNAKKEYMGLAIKNDNLVYVYNLGTKDVEIPLDSKPVSSWPAYFSIVKIERVGKHGKVFLTVPSLSSTAEEKFIKKGEFSGDDSLLDLDPEDTVFYVGGVPSNFKLPTSLNLPGFVGCLELATLNNDVISLYNFKHIYNMDPSTSVPCARDKLAFTQSRAASYFFDGSGYAVVRDITRRGKFGQVTRFDIEVRTPADNGLILLMVNGSMFFRLEMRNGYLHVFYDFGFSGGPVHLEDTLKKAQINDAKYHEISIIYHNDKKMILVVDRRHVKSMDNEKMKIPFTDIYIGGAPPEILQSRALRAHLPLDINFRGCMKGFQFQKKDFNLLEQTETLGVGYGCPEDSLISRRAYFNGQSFIASIQKISFFDGFEGGFNFRTLQPNGLLFYYASGSDVFSISLDNGTVIMDVKGIKVQSVDKQYNDGLSHFVISSVSPTRYELIVDKSRVGSKNPTKGKIEQTQASEKKFYFGGSPISAQYANFTGCISNAYFTRVDRDVEVEDFQRYTEKVHTSLYECPIESSPLFLLHKKGKNLSKPKASQNKKGGKSKDAPSWDPVALKLPERNTPRNSHCHLSNSPRAIEHAYQYGGTANSRQEFEHLKGDFGAKSQFSIRLRTRSSHGMIFYVSDQEENDFMTLFLAHGRLVYMFNVGHKKLKIRSQEKYNDGLWHDVIFIRERSSGRLVIDGLRVLEESLPPTEATWKIKGPIYLGGVAPGKAVKNVQINSIYSFSGCLSNLQLNGASITSASQTFSVTPCFEGPMETGTYFSTEGGYVVLDESFNIGLKFEIAFEVRPRSSSGTLVHGHSVNGEYLNVHMKNGQVIVKVNNGIRDFSTSVTPKQSLCDGRWHRITVIRDSNVVQLDVDSEVNHVVGPLNPKPIDHREPVFVGGVPESLLTPRLAPSKPFTGCIRHFVIDGHPVSFSKAALVSGAVSINSCPAA

SEQ ID NO: 51 - protein, 448 aa, Homo sapiens
MLWLALGPFPAMENQVLVIRIKIPNSGAVDWTVHSGPQLLFRDVLDVIGQVLPEATTTAFEYEDEDGDRITVRSDEEMKAMLSYYYSTVMEQQVNGQLIEPLQIFPRACKPPGERNIHGLKVNTRAGPSQHSSPAVSDSLPSNSLKKSSAELKKILANGQMNEQDIRYRDTLGHGNGGTVYKAYHVPSGKILAVKVILLDITLELQKQIMSELEILYKCDSSYIIGFYGAFFVENRISICTEFMDGGSLDVYRKMPEHVLGRIAVAVVKGLTYLWSLKILHRDVKPSNMLVNTRGQVKLCDFGVSTQLVNSIAKTYVGTNAYMAPERISGEQYGIHSDVWSLGISFMELALGRFPYPQIQKNQGSLMPLQLLQCIVDEDSPVLPVGEFSEPFVHFITQCMRKQPKERPAPEELMGHPFIVQFNDGNAAVVSMWVCRALEERRSQQGPP

SEQ ID NO: 52 - protein, 239 aa, Homo sapiens
MAHAGRTGYDNREIVMKYIHYKLSQRGYEWDAGDVGAAPPGAAPAPGIFSSQPGHTPHPAASRDPVARTSPLQTPAAPGAAAGPALSPVPPVVHLTLRQAGDDFSRRYRRDFAEMSSQLHLTPFTARGRFATVVEELFRDGVNWGRIVAFFEFGGVMCVESVNREMSPLVDNIALWMTEYLNRHLHTWIQDNGGWDAFVELYGPSMRPLFDFSWLSLKTLLSLALVGACITLGAYLGHK

SEQ ID NO: 53 - protein, 406 aa, Homo sapiens
MAAGAGAGSAPRWLRALSEPLSAAQLRRLEEHRYSAAGVSLLEPPLQLYWTWLLQWIPLWMAPNSITLLGLAVNVVTTLVLISYCPTATEEAPYWTYLLCALGLFIYQSLDAIDGKQARRTNSCSPLGELFDHGCDSLSTVFMAVGASIAARLGTYPDWFFFCSFIGMFVFYCAHWQTYVSGMLRFGKVDVTEIQIALVIVFVLSAFGGATMWDYTIPILEIKLKILPVLGFLGGVIFSCSNYFHVILHGGVGKNGSTIAGTSVLSPGLHIGLIIILAIMIYKKSATDVFEKHPCLYILMFGCVFAKVSQKLVVAHMTKSELYLQDTVFLGPGLLFLDQYFNNFIDEYVVLWMAMVISSFDMVIYFSALCLQISRHLHLNIFKTACHQAPEQVQVLSSKSHQNNMD

SEQ ID NO: 54 - protein, 957 aa, Homo sapiens
MYGSARTITNLEGSPSRSPRLPRSPRLGHRRTSSGGGGGTGKTLSMENIQSLNAAYATSGPMYLSDHEGVASTTYPKGTMTLGRATNRAVYGGRVTAMGSSPNIASAGLSHTDVLSYTDQHGGLTGSSHHHHHQVPSMLRQVRDSTMLDLQAQLKELQRENDLLRKELDIKDSKLGSSMNSIKTFWSPELKKERVLRKEEAARMSVLKEQMRVSHEENQHLQLTIQALQDELRTQRDLNHLLQQESGNRGAEHFTIELTEENFRRLQAEHDRQAKELFLLRKTLEEMELRIETQKQTLNARDESIKKLLEMLQSKGLPSKSLEDDNERTRRMAEAESQVSHLEVILDQKEKENIHLREELHRRSQLQPEPAKTKALQTVIEMKDTKIASLERNIRDLEDEIQMLKANGVLNTEDREEEIKQIEVYKSHSKFMKTKIDQLKQELSKKESELLALQTKLETLSNQNSDCKQHIEVLKESLTAKEQRAAILQTEVDALRLRLEEKESFLNKKTKQLQDLTEEKGTLAGEIRDMKDMLEVKERKINVLQKKIENLQEQLRDKDKQLTNLKDRVKSLQTDSSNTDTALATLEEALSEKERIIERLKEQRERDDRERLEEIESFRKENKDLKEKVNALQAELTEKESSLIDLKEHASSLASAGLKRDSKLKSLEIAIEQKKEECSKLEAQLKKAHNIEDDSRMNPEFADQIKQLDKEASYYRDECGKAQAEVDRLLEILKEVENEKNDKDKKIAELESLTLRHMKDQNKKVANLKHNQQLEKKKNAQLLEEVRRREDSMADNSQHLQIEELMNALEKTRQELDATKARLASTQQSLAEKEAHLANLRIERRKQLEEILEMKQEALLAAISEKDANIALLELSASKKKKTQEEVMALKREKDRLVHQLKQQTQNRMKLMADNYDDDHHHYHHHHHHHHHRSPGRSQHSNHRPSPDQDDEEGIWA

SEQ ID NO: 55 - protein, 263 aa, Homo sapiens
MVKIAFNTPTAVQKEEARQDVEALLSRTVRTQILTGKELRVATQEKEGSSGRCMLTLLGLSFILAGLIVGGACIYKYFMPKSTIYRGEMCFFDSEDPANSLRGGEPNFLPVTEEADIREDDNIAIIDVPVPSFSDSDPAAIIHDFEKGMTAYLDLLLGNCYLMPLNTSIVMPPKNLVELFGKLASGRYLPQTYVVREDLVAVEEIRDVSNLGIFIYQLCNNRKSFRLRRRDLLLGFNKRAIDKCWKIRHFPNEFIVETKICQE

SEQ ID NO: 56 - protein, 1093 aa, Homo sapiens
MARPVRGGLGAPRRSPCLLLLWLLLLRLEPVTAAAGPRAPCAAACTCAGDSLDCGGRGLAALPGDLPSWTRSLNLSYNKLSEIDPAGFEDLPNLQEVYLNNNELTAVPSLGAASSHVVSLFLQHNKIRSVEGSQLKAYLSLEVLDLSLNNITEVRNTCFPHGPPIKELNLAGNRIGTLELGAFDGLSRSLLTLRLSKNRITQLPVRAFKLPRLTQLDLNRNRIRLIEGLTFQGLNSLEVLKLQRNNISKLTDGAFWGLSKMHVLHLEYNSLVEVNSGSLYGLTALHQLHLSNNSIARIHRKGWSFCQKLHELVLSFNNLTRLDEESLAELSSLSVLRLSHNSISHIAEGAFKGLRSLRVLDLDHNEISGTIEDTSGAFSGLDSLSKLTLFGNKIKSVAKRAFSGLEGLEHLNLGGNAIRSVQFDAFVKMKNLKELHISSDSFLCDCQLKWLPPWLIGRMLQAFVTATCAHPESLKGQSIFSVPPESFVCDDFLKPQIITQPETTMAMVGKDIRFTCSAASSSSSPMTFAWKKDNEVLTNADMENFVHVHAQDGEVMEYTTILHLRQVTFGHEGRYQCVITNHFGSTYSHKARLTVNVLPSFTKTPHDITIRTTTMARLECAATGHPNPQIAWQKDGGTDFPAARERRMHVMPDDDVFFITDVKIDDAGVYSCTAQNSAGSISANATLTVLETPSLVVPLEDRVVSVGETVALQCKATGNPPPRITWFKGDRPLSLTERHHLTPDNQLLVVQNVVAEDAGRYTCEMSNTLGTERAHSQLSVLPAAGCRKDGTTVGIFTIAVVSSIVLTSLVWVCIIYQTRKKSEEYSVTNTDETVVPPDVPSYLSSQGTLSDRQETVVRTEGGPQANGHIESNGVCPRDASHFPEPDTHSVACRQPKLCAGSAYHKEPWKAMEKAEGTPGPHKMEHGGRVVCSDCNTEVDCYSRGQAFHPQPVSRDSAQPSAPNGPEPGGSDQEHSPHHQCSRTAAGSCPECQGSLYPSNHDRMLTAVKKKPMASLDGKGDSSWTLARLYHPDSTELQPASSLTSGSPERAEAQYLLVSNGHLPKACDASPESTPLTGQLPGKQRVPLLLAPKS

SEQ ID NO: 57 - protein, 758 aa, Homo sapiens
MAEPRQEFEVMEDHAGTYGLGDRKDQGGYTMHQDQEGDTDAGLKESPLQTPTEDGSEEPGSETSDAKSTPTAEDVTAPLVDEGAPGKQAAAQPHTEIPEGTTAEEAGIGDTPSLEDEAAGHVTQEPESGKVVQEGFLREPGPPGLSHQLMSGMPGAPLLPEGPREATRQPSGTGPEDTEGGRHAPELLKHQLLGDLHQEGPPLKGAGGKERPGSKEEVDEDRDVDESSPQDSPPSKASPAQDGRPPQTAAREATSIPGFPAEGAIPLPVDFLSKVSTEIPASEPDGPSVGRAKGQDAPLEFTFHVEITPNVQKEQAHSEEHLGRAAFPGAPGEGPEARGPSLGEDTKEADLPEPSEKQPAAAPRGKPVSRVPQLKARMVSKSKDGTGSDDKKAKTSTRSSAKTLKNRPCLSPKHPTPGSSDPLIQPSSPAVCPEPPSSPKYVSSVTSRTGSSGAKEMKLKGADGKTKIATPRGAAPPGQKGQANATRIPAKTPPAPKTPPSSGEPPKSGDRSGYSSPGSPGTPGSRSRTPSLPTPPTREPKKVAVVRTPPKSPSSAKSRLQTAPVPMPDLKNVKSKIGSTENLKHQPGGGKVQIINKKLDLSNVQSKCGSKDNIKHVPGGGSVQIVYKPVDLSKVTSKCGSLGNIHHKPGGGQVEVKSEKLDFKDRVQSKIGSLDNITHVPGGGNKKIETHKLTFRENAKAKTDHGAEIVYKSPVVSGDTSPRHLSNVSSTGSIDMVDSPQLATLADEVSASLAKQGL

SEQ ID NO: 58 - protein, 671 aa, Homo sapiens
MADPAAGPPPSEGEESTVRFARKGALRQKNVHEVKNHKFTARFFKQPTFCSHCTDFIWGFGKQGFQCQVCCFVVHKRCHEFVTFSCPGADKGPASDDPRSKHKFKIHTYSSPTFCDHCGSLLYGLIHQGMKCDTCMMNVHKRCVMNVPSLCGTDHTERRGRIYIQAHIDRDVLIVLVRDAKNLVPMDPNGLSDPYVKLKLIPDPKSESKQKTKTIKCSLNPEWNETFRFQLKESDKDRRLSVEIWDWDLTSRNDFMGSLSFGISELQKASVDGWFKLLSQEEGEYFNVPVPPEGSEANEELRQKFERAKISQGTKVPEEKTTNTVSKFDNNGNRDRMKLTDFNFLMVLGKGSFGKVMLSERKGTDELYAVKILKKDVVIQDDDVECTMVEKRVLALPGKPPFLTQLHSCFQTMDRLYFVMEYVNGGDLMYHIQQVGRFKEPHAVFYAAEIAIGLFFLQSKGIIYRDLKLDNVMLDSEGHIKIADFGMCKENIWDGVTTKTFCGTPDYIAPEIIAYQPYGKSVDWWAFGVLLYEMLAGQAPFEGEDEDELFQSIMEHNVAYPKSMSKEAVAICKGLMTKHPGKRLGCGPEGERDIKEHAFFRYIDWEKLERKEIQPPYKPKARDKRDTSNFDKEFTRQPVELTPTDKLFIMNLDQNEFAGFSYTNPEFVINV

SEQ ID NO: 59 - protein, 1566 aa, Homo sapiens
MTADKDKDKDKEKDRDRDRDREREKRDKARESENSRPRRSCTLEGGAKNYAESDHSEDEDNDNNSATAEESTKKNKKKPPKKKSRYERTDTGEITSYITEDDVVYRPGDCVYIESRRPNTPYFICSIQDFKLVHNSQACCRSPTPALCDPPACSLPVASQPPQHLSEAGRGPVGSKRDHLLMNVKWYYRQSEVPDSVYQHLVQDRHNENDSGRELVITDPVIKNRELFISDYVDTYHAAALRGKCNISHFSDIFAAREFKARVDSFFYILGYNPETRRLNSTQGEIRVGPSHQAKLPDLQPFPSPDGDTVTQHEELVWMPGVNDCDLLMYLRAARSMAAFAGMCDGGSTEDGCVAASRDDTTLNALNTLHESGYDAGKALQRLVKKPVPKLIEKCWTEDEVKRFVKGLRQYGKNFFRIRKELLPNKETGELITFYYYWKKTPEAASSRAHRRHRRQAVFRRIKTRTASTPVNTPSRPPSSEFLDLSSASEDDFDSEDSEQELKGYACRHCFTTTSKDWHHGGRENILLCTDCRIHFKKYGELPPIEKPVDPPPFMFKPVKEEDDGLSGKHSMRTRRSRGSMSTLRSGRKKQPASPDGRTSPINEDIRSSGRNSPSAASTSSNDSKAETVKKSAKKVKEEASSPLKSNKRQREKVASDTEEADRTSSKKTKTQEISRPNSPSEGEGESSDSRSVNDEGSSDPKDIDQDNRSTSPSIPSPQDNESDSDSSAQQQMLQAQPPALQAPTGVTPAPSSAPPGTPQLPTPGPTPSATAVPPQGSPTASQAPNQPQAPTAPVPHTHIQQAPALHPQRPPSPHPPPHPSPHPPLQPLTGSAGQPSAPSHAQPPLHGQGPPGPHSLQAGPLLQHPGPPQPFGLPPQASQGQAPLGTSPAAAYPHTSLQLPASQSALQSQQPPREQPLPPAPLAMPHIKPPPTTPIPQLPAPQAHKHPPHLSGPSPFSMNANLPPPPALKPLSSLSTHHPPSAHPPPLQLMPQSQPLPSSPAQPPGLTQSQNLPPPPASHPPTGLHQVAPQPPFAQHPFVPGGPPPITPPTCPSTSTPPAGPGTSAQPPCSGAAASGGSIAGGSSCPLPTVQIKEEALDDAEEPESPPPPPRSPSPEPTVVDTPSHASQSARFYKHLDRGYNSCARTDLYFMPLAGSKLAKKREEAIEKAKREAEQKAREEREREKEKEKEREREREREREAERAAKASSSAHEGRLSDPQLSGPGHMRPSFEPPPTTIAAVPPYIGPDTPALRTLSEYARPHVMSPTNRNHPFYMPLNPTDPLLAYHMPGLYNVDPTIRERELREREIREREIRERELRERMKPGFEVKPPELDPLHPAANPMEHFARHSALTIPPTAGPHPFASFHPGLNPLERERLALAGPQLRPEMSYPDRLAAERIHAERMASLTSDPLARLQMFNVTPHHHQHSHIHSHLHLHQQDPLHQGSAGPVHPLVDPLTAGPHLARFPYPPGTLPNPLLGQPPHEHEMLRHPVFGTPYPRDLPGAIPPPMSAAHQLQAMHAQSAELQRLAMEQQWLHGHPHMHGGHLPSQEDYYSRLKKEGDKQL

SEQ ID NO: 60 - protein, 271 aa, Homo sapiens
MVGALCGCWFRLGGARPLIPLGPTVVQTSMSRSQVALLGLSLLLMLLLYVGLPGPPEQTSCLWGDPNVTVLAGLTPGNSPIFYREVLPLNQAHRVEVVLLHGKAFNSHTWEQLGTLQLLSQRGYRAVALDLPGFGNSAPSKEASTEAGRAALLERALRDLEVQNAVLVSPSLSGHYALPFLMRGHHQLHGFVPIAPTSTQNYTQEQFWAVKTPTLILYGELDHILARESLRQLRHLPNHSVVKLRNAGHACYLHKPQDFHLVLLAFLDHLP

SEQ ID NO: 61 - protein, 993 aa, Homo sapiens
MPALARDGGQLPLLVVFSAMIFGTITNQDLPVIKCVLINHKNNDSSVGKSSSYPMVSESPEDLGCALRPQSSGTVYEAAAVEVDVSASITLQVLVDAPGNISCLWVFKHSSLNCQPHFDLQNRGVVSMVILKMTETQAGEYLLFIQSEATNYTILFTVSIRNTLLYTLRRPYFRKMENQDALVCISESVPEPIVEWVLCDSQGESCKEESPAVVKKEEKVLHELFGTDIRCCARNELGRECTRLFTIDLNQTPQTTLPQLFLKVGEPLWIRCKAVHVNHGFGLTWELENKALEEGNYFEMSTYSTNRTMIRILFAFVSSVARNDTGYYTCSSSKHPSQSALVTIVEKGFINATNSSEDYEIDQYEEFCFSVRFKAYPQIRCTWTFSRKSFPCEQKGLDNGYSISKFCNHKHQPGEYIFHAENDDAQFTKMFTLNIRRKPQVLAEASASQASCFSDGYPLPSWTWKKCSDKSPNCTEEITEGVWNRKANRKVFGQWVSSSTLNMSEAIKGFLVKCCAYNSLGTSCETILLNSPGPFPFIQDNISFYATIGVCLLFIVVLTLLICHKYKKQFRYESQLQMVQVTGSSDNEYFYVDFREYEYDLKWEFPRENLEFGKVLGSGAFGKVMNATAYGISKTGVSIQVAVKMLKEKADSSEREALMSELKMMTQLGSHENIVNLLGACTLSGPIYLIFEYCCYGDLLNYLRSKREKFHRTWTEIFKEHNFSFYPTFQSHPNSSMPGSREVQIHPDSDQISGLHGNSFHSEDEIEYENQKRLEEEEDLNVLTFEDLLCFAYQVAKGMEFLEFKSCVHRDLAARNVLVTHGKVVKICDFGLARDIMSDSNYVVRGNARLPVKWMAPESLFEGIYTIKSDVWSYGILLWEIFSLGVNPYPGIPVDANFYKLIQNGFKMDQPFYATEEIYIIMQSCWAFDSRKRPSFPNLTSFLGCQLADAEEAMYQNVDGRVSECPHTYQNRRPFSREMDLGLLSPQAQVEDS

SEQ ID NO: 62 - protein, 550 aa, Homo sapiens
MTGDKGPQRLSGSSYGSISSPTSPTSPGPQQAPPRETYLSEKIPIPDTKPGTFSLRKLWAFTGPGFLMSIAFLDPGNIESDLQAGAVAGFKLLWVLLWATVLGLLCQRLAARLGVVTGKDLGEVCHLYYPKVPRTVLWLTIELAIVGSDMQEVIGTAIAFNLLSAGRIPLWGGVLITIVDTFFFLFLDNYGLRKLEAFFGLLITIMALTFGYEYVVARPEQGALLRGLFLPSCPGCGHPELLQAVGIVGAIIMPHNIYLHSALVKSREIDRARRADIREANMYFLIEATIALSVSFIINLFVMAVFGQAFYQKTNQAAFNICANSSLHDYAKIFPMNNATVAVDIYQGGVILGCLFGPAALYIWAIGLLAAGQSSTMTGTYAGQFVMEGFLRLRWSRFARVLLTRSCAILPTVLVAVFRDLRDLSGLNDLLNVLQSLLLPFAVLPILTFTSMPTLMQEFANGLLNKVVTSSIMVLVCAINLYFVVSYLPSLPHPAYFGLAALLAAAYLGLSTYLVWTCCLAHGATFLAHSSHHHFLYGLLEEDQKGETSG

SEQ ID NO: 63 - protein, 1299 aa, Homo sapiens
MSLQEMFRFPMGLLLGSVLLVASAPATLEPPGCSNKEQQVTVSHTYKIDVPKSALVQVDADPQPLSDDGASLLALGEAREEQNIIFRHNIRLQTPQKDCELAGSVQDLLARVKKLEEEMVEMKEQCSAQRCCQGVTDLSRHCSGHGTFSLETCSCHCEEGREGPACERLACPGACSGHGRCVDGRCLCHEPYVGADCGYPACPENCSGHGECVRGVCQCHEDFMSEDCSEKRCPGDCSGHGFCDTGECYCEEGFTGLDCAQVVTPQGLQLLKNTEDSLLVSWEPSSQVDHYLLSYYPLGKELSGKQIQVPKEQHSYEILGLLPGTKYIVTLRNVKNEVSSSPQHLLATTDLAVLGTAWVTDETENSLDVEWENPSTEVDYYKLRYGPMTGQEVAEVTVPKSSDPKSRYDITGLHPGTEYKITVVPMRGELEGKPILLNGRTEIDSPTNVVTDRVTEDTATVSWDPVQAVIDKYVVRYTSADGDTKEMAVHKDESSTVLTGLKPGEAYKVYVWAERGNQGSKKADTNALTEIDSPANLVTDRVTENTATISWDPVQATIDKYVVRYTSADDQETREVLVGKEQSSTVLTGLRPGVEYTVHVWAQKGDRESKKADTNAPTDIDSPKNLVTDRVTENMATVSWDPVQAAIDKYVVRYTSAGGETREVPVGKEQSSTVLTGLRPGMEYMVHVWAQKGDQESKKADTKAQTDIDSPQNLVTDRVTENMATVSWDPVRATIDRYVVRYTSAKDGETREVPVGKEQSSTVLTGLRPGVEYTVHVWAQKGAQESKKADTKAQTDIDSPQNLVTDWVTENTATVSWDPVQATIDRYVVHYTSANGETREVPVGKEQSSTVLTGLRPGMEYTVHVWAQKGNQESKKADTKAQTEIDGPKNLVTDWVTENMATVSWDPVQATIDKYMVRYTSADGETREVPVGKEHSSTVLTGLRPGMEYMVHVWAQKGAQESKKADTKAQTELDPPRNLRPSAVTQSGGILTWTPPSAQIHGYILTYQFPDGTVKEMQLGREDQRFALQGLEQGATYPVSLVAFKGGRRSRNVSTTLSTVGARFPHPSDCSQVQQNSNAASGLYTIYLHGDASRPLQVYCDMETDGGGWIVFQRRNTGQLDFFKRWRSYVEGFGDPMKEFWLGLDKLHNLTTGTPARYEVRVDLQTANESAYAIYDFFQVASSKERYKLTVGKYRGTAGDALTYHNGWKFTTFDRDNDIALSNCALTHHGGWWYKNCHLANPNGRYGETKHSEGVNWEPWKGHEFSIPYVELKIRPHGYSREPVLGRKKRTLRGRLRTF

SEQ ID NO: 64 - protein, 558 aa, Homo sapiens
MAALTRDPQFQKLQQWYREHRSELNLRRLFDANKDRFNHFSLTLNTNHGHILVDYSKNLVTEDVMRMLVDLAKSRGVEAARERMFNGEKINYTEGRAVLHVALRNRSNTPILVDGKDVMPEVNKVLDKMKSFCQRVRSGDWKGYTGKTITDVINIGIGGSDLGPLMVTEALKPYSSGGPRVWYVSNIDGTHIAKTLAQLNPESSLFIIASKTFTTQETITNAETAKEWFLQAAKDPSAVAKHFVALSTNTTKVKEFGIDPQNMFEFWDWVGGRYSLWSAIGLSIALHVGFDNFEQLLSGAHWMDQHFRTTPLEKNAPVLLALLGIWYINCFGCETHAMLPYDQYLHRFAAYFQQGDMESNGKYITKSGTRVDHQTGPIVWGEPGTNGQHAFYQLIHQGTKMIPCDFLIPVQTQHPIRKGLHHKILLANFLAQTEALMRGKSTEEARKELQAAGKSPEDLERLLPHKVFEGNRPTNSIVFTKLTPFMLGALVAMYEHKIFVQGIIWDINSFDQWGVELGKQLAKKIEPELDGSAQVTSHDASTNGLINFIKQQREARVQ

SEQ ID NO: 65 - protein, 138 aa, Homo sapiens
MILQQPLQRGPQGGAQRLPRAALGVTWGLDASSPLRGAVPMSTKRRLEEEQEPLRKQFLSEENMATHFSQLSLHNDHPYCSPPMTFSPALPPLRSPCSELLLWRYPGSLIPEALRLLRLGDTPSPPYPATPAGDIMEL

SEQ ID NO: 66 - protein, 513 aa, Homo sapiens
MTLLPGDNSDYDYSALSCTSDASFHPAFLPQRQAIKGAFYRRAQRLRPQDEPRQGCQPEDRRRRIIINVGGIKYSLPWTTLDEFPLTRLGQLKACTNFDDILNVCDDYDVTCNEFFFDRNPGAFGTILTFLRAGKLRLLREMCALSFQEELLYWGIAEDHLDGCCKRRYLQKIEEFAEMVEREEEDDALDSEGRDSEGPAEGEGRLGRCMRRLRDMVERPHSGLPGKVFACLSVLFVTVTAVNLSVSTLPSLREEEEQGHCSQMCHNVFIVESVCVGWFSLEFLLRLIQAPSKFAFLRSPLTLIDLVAILPYYITLLVDGAAAGRRKPGAGNSYLDKVGLVLRVLRALRILYVMRLARHSLGLQTLGLTARRCTREFGLLLLFLCVAIALFAPLLYVIENEMADSPEFTSIPACYWWAVITMTTVGYGDMVPRSTPGQVVALSSILSGILLMAFPVTSIFHTFSRSYLELKQEQERVMFRRAQFLIKTKSQLSVSQDSDILFGSASSDTRDNN

SEQ ID NO: 67 - protein, 290 aa, Homo sapiens
MGSSKKVTLSVLSREQSEGVGARVRRSIGRPELKNLDPFLLFDEFKGGRPGGFPDHPHRGFETVSYLLEGGSMAHEDFCGHTGKMNPGDLQWMTAGRGILHAEMPCSEEPAHGLQLWVNLRSSEKMVEPQYQELKSEEIPKPSKDGVTVAVISGEALGIKSKVYTRTPTLYLDFKLDPGAKHSQPIPKGWTSFIYTISGDVYIGPDDAQQKIEPHHTAVLGEGDSVQVENKDPKRSHFVLIAGEPLREPVIQHGPFVMNTNEEISQAILDFRNAKNGFERAKTWKSKIGN

SEQ ID NO: 68 - protein, 246 aa, Homo sapiens
MSLQWTAVATFLYAEVFVVLLLCIPFISPKRWQKIFKSRLVELLVSYGNTFFVVLIVILVLLVIDAVREIRKYDDVTEKVNLQNNPGAMEHFHMKLFRAQRNLYIAGFSLLLSFLLRRLVTLISQQATLLASNEAFKKQAESASEAAKKYMEENDQLKKGAAVDGGKLDVGNAEVKLEEENRSLKADLQKLKDELASTKQKLEKAENQVLAMRKQSEGLTKEYDRLLEEHAKLQAAVDGPMDKKEE

SEQ ID NO: 69 - protein, 875 aa, Homo sapiens
MDEEEDNLSLLTALLEENESALDCNSEENNFLTRENGEPDAFDELFDADGDGESYTEEADDGETGETRDEKENLATLFGDMEDLTDEEEVPASQSTENRVLPAPAPRREKTNEELQEELRNLQEQMKALQEQLKVTTIKQTASPARLQKSPVEKSPRPPLKERRVQRIQESTCFSAELDVPALPRTKRVARTPKASPPDPKSSSSRMTSAPSQPLQTISRNKPSGITRGQIVGTPGSSGETTQPICVEAFSGLRLRRPRVSSTEMNKKMTGRKLIRLSQIKEKMAREKLEEIDWVTFGVILKKVTPQSVNSGKTFSIWKLNDLRDLTQCVSLFLFGEVHKALWKTEQGTVVGILNANPMKPKDGSEEVCLSIDHPQKVLIMGEALDLGTCKAKKKNGEPCTQTVNLRDCEYCQYHVQAQYKKLSAKRADLQSTFSGGRIPKKFARRGTSLKERLCQDGFYYGGVSSASYAASIAAAVAPKKKIQTTLSNLVVKGTNLIIQETRQKLGIPQKSLSCSEEFKELMDLPTCGARNLKQHLAKATASGIMGSPKPAIKSISASALLKQQKQRMLEMRRRKSEEIQKRFLQSSSEVESPAVPSSSRQPPAQPPRTGSEFPRLEGAPATMTPKLGRGVLEGDDVLFYDESPPPRPKLSALAEAKKLAAITKLRAKGQVLTKTNPNSIKKKQKDPQDILEVKERVEKNTMFSSQAEDELEPARKKRREQLAYLESEEFQKILKAKSKHTGILKEAEAEMQERYFEPLVKKEQMEEKMRNIREVKCRVVTCKTCAYTHFKLLETCVSEQHEYHWHDGVKRFFKCPCGNRSISLDRLPNKHCSNCGLYKWERDGMLKEKTGPKIGGETLLPRGEEHAKFLNSLK

SEQ ID NO: 70 - protein, 651 aa, Homo sapiens
MKDYDELLKYYELHETIGTGGFAKVKLACHILTGEMVAIKIMDKNTLGSDLPRIKTEIEALKNLRHQHICQLYHVLETANKIFMVLEYCPGGELFDYIISQDRLSEEETRVVFRQIVSAVAYVHSQGYAHRDLKPENLLFDEYHKLKLIDFGLCAKPKGNKDYHLQTCCGSLAYAAPELIQGKSYLGSEADVWSMGILLYVLMCGFLPFDDDNVMALYKKIMRGKYDVPKWLSPSSILLLQQMLQVDPKKRISMKNLLNHPWIMQDYNYPVEWQSKNPFIHLDDDCVTELSVHHRNNRQTMEDLISLWQYDHLTATYLLLLAKKARGKPVRLRLSSFSCGQASATPFTDIKSNNWSLEDVTASDKNYVAGLIDYDWCEDDLSTGAATPRTSQFTKYWTESNGVESKSLTPALCRTPANKLKNKENVYTPKSAVKNEEYFMFPEPKTPVNKNQHKREILTTPNRYTTPSKARNQCLKETPIKIPVNSTGTDKLMTGVISPERRCRSVELDLNQAHMEETPKRKGAKVFGSLERGLDKVITVLTRSKRKGSARDGPRRLKLHYNVTTTRLVNPDQLLNEIMSILPKKHVDFVQKGYTLKCQTQSDFGKVTMQFELEVCQLQKPDVVGIRRQRLKGDAWVYKRLVEDILSSCKV

SEQ ID NO: 71 - protein, 246 aa, Homo sapiens
MAAAAATKILLCLPLLLLLSGWSRAGRADPHSLCYDITVIPKFRPGPRWCAVQGQVDEKTFLHYDCGNKTVTPVSPLGKKLNVTTAWKAQNPVLREVVDILTEQLRDIQLENYTPKEPLTLQARMSCEQKAEGHSSGSWQFSFDGQIFLLFDSEKRMWTTVHPGARKMKEKWENDKVVAMSFHYFSMGDCIGWLEDFLMGMDSTLEPSAGAPLAMSSGTTQLRATATTLILCCLLIILPCFILPGI

SEQ ID NO: 72 - protein, 1362 aa, Homo sapiens
MSAESGPGTRLRNLPVMGDGLETSQMSTTQAQAQPQPANAASTNPPPPETSNPNKPKRQTNQLQYLLRVVLKTLWKHQFAWPFQQPVDAVKLNLPDYYKIIKTPMDMGTIKKRLENNYYWNAQECIQDFNTMFTNCYIYNKPGDDIVLMAEALEKLFLQKINELPTEETEIMIVQAKGRGRGRKETGTAKPGVSTVPNTTQASTPPQTQTPQPNPPPVQATPHPFPAVTPDLIVQTPVMTVVPPQPLQTPPPVPPQPQPPPAPAPQPVQSHPPIIAATPQPVKTKKGVKRKADTTTPTTIDPIHEPPSLPPEPKTTKLGQRRESSRPVKPPKKDVPDSQQHPAPEKSSKVSEQLKCCSGILKEMFAKKHAAYAWPFYKPVDVEALGLHDYCDIIKHPMDMSTIKSKLEAREYRDAQEFGADVRLMFSNCYKYNPPDHEVVAMARKLQDVFEMRFAKMPDEPEEPVVAVSSPAVPPPTKVVAPPSSSDSSSDSSSDSDSSTDDSEEERAQRLAELQEQLKAVHEQLAALSQPQQNKPKKKEKDKKEKKKEKHKRKEEVEENKKSKAKEPPPKKTKKNNSSNSNVSKKEPAPMKSKPPPTYESEEEDKCKPMSYEEKRQLSLDINKLPGEKLGRVVHIIQSREPSLKNSNPDEIEIDFETLKPSTLRELERYVTSCLRKKRKPQAEKVDVIAGSSKMKGFSSSESESSSESSSSDSEDSETEMAPKSKKKGHPGREQKKHHHHHHQQMQQAPAPVPQQPPPPPQQPPPPPPPQQQQQPPPPPPPPSMPQQAAPAMKSSPPPFIATQVPVLEPQLPGSVFDPIGHFTQPILHLPQPELPPHLPQPPEHSTPPHLNQHAVVSPPALHNALPQQPSRPSNRAAALPPKPARPPAVSPALTQTPLLPQPPMAQPPQVLLEDEEPPAPPLTSMQMQLYLQQLQKVQPPTPLLPSVKVQSQPPPPLPPPPHPSVQQQLQQQPPPPPPPQPQPPPQQQHQPPPRPVHLQPMQFSTHIQQPPPPQGQQPPHPPPGQQPPPPQPAKPQQVIQHHHSPRHHKSDPYSTGHLREAPSPLMIHSPQMSQFQSLTHQSPPQQNVQPKKQELRAASVVQPQPLVVVKEEKIHSPIIRSEPFSPSLRPEPPKHPESIKAPVHLPQRPEMKPVDVGRPVIRPPEQNAPPPGAPDKDKQKQEPKTPVAPKKDLKIKNMGSWASLVQKHPTTPSSTAKSSSDSFEQFRRAAREKEEREKALKAQAEHAEKEKERLRQERMRSREDEDALEQARRAHEEARRRQEQQQQQRQEQQQQQQQQAAAVAAAATPQAQSSQPQSMLDQQRELARKREQERRRREAMAATIDMNFQSDLLSIFEENLF

SEQ ID NO: 73 - protein, 302 aa, Homo sapiens
MCAERLGQFMTLALVLATFDPARGTDATNPPEGPQDRSSQQKGRLSLQNTAEIQHCLVNAGDVGCGVFECFENNSCEIRGLHGICMTFLHNAGKFDAQGKSFIKDALKCKAHALRHRFGCISRKCPAIREMVSQLQRECYLKHDLCAAAQENTRVIVEMIHFKDLLLHEPYVDLVNLLLTCGEEVKEAITHSVQVQCEQNWGSLCSILSFCTSAIQKPPTAPPERQPQVDRTKLSRAHHGEAGHHLPEPSSRETGRGAKGERGSKSHPNAHARGRVGGLGAQGPSGSSEWEDEQSEYSDIRR

SEQ ID NO: 74 - protein, 763 aa, Homo sapiens
MKTSPRRPLILKRRRLPLPVQNAPSETSEEEPKRSPAQQESNQAEASKEVAESNSCKFPAGIKIINHPTMPNTQVVAIPNNANIHSIITALTAKGKESGSSGPNKFILISCGGAPTQPPGLRPQTQTSYDAKRTEVTLETLGPKPAARDVNLPRPPGALCEQKRETCADGEAAGCTINNSLSNIQWLRKMSSDGLGSRSIKQEMEEKENCHLEQRQVKVEEPSRPSASWQNSVSERPPYSYMAMIQFAINSTERKRMTLKDIYTWIEDHFPYFKHIAKPGWKNSIRHNLSLHDMFVRETSANGKVSFWTIHPSANRYLTLDQVFKPLDPGSPQLPEHLESQQKRPNPELRRNMTIKTELPLGARRKMKPLLPRVSSYLVPIQFPVNQSLVLQPSVKVPLPLAASLMSSELARHSKRVRIAPKVLLAEEGIAPLSSAGPGKEEKLLFGEGFSPLLPVQTIKEEEIQPGEEMPHLARPIKVESPPLEEWPSPAPSFKEESSHSWEDSSQSPTPRPKKSYSGLRSPTRCVSEMLVIQHRERRERSRSRRKQHLLPPCVDEPELLFSEGPSTSRWAAELPFPADSSDPASQLSYSQEVGGPFKTPIKETLPISSTPSKSVLPRTPESWRLTPPAKVGGLDFSPVQTSQGASDPLPDPLGLMDLSTTPLQSAPPLESPQRLLSSEPLDLISVPFGNSSPSDIDVPKPGSPEPQVSGLAANRSLTEGLVLDTMNDSLSKILLDISFPGLDEDPLGPDNINWSQFIPELQ

SEQ ID NO: 75 - protein, 725 aa, Homo sapiens
MAMDSSLQARLFPGLAIKIQRSNGLIHSANVRTVNLEKSCVSVEWAEGGATKGKEIDFDDVAAINPELLQLLPLHPKDNLPLQENVTIQKQKRRSVNSKIPAPKESLRSRSTRMSTVSELRITAQENDMEVELPAAANSRKQFSVPPAPTRPSCPAVAEIPLRMVSEEMEEQVHSIRGSSSANPVNSVRRKSCLVKEVEKMKNKREEKKAQNSEMRMKRAQEYDSSFPNWEFARMIKEFRATLECHPLTMTDPIEEHRICVCVRKRPLNKQELAKKEIDVISIPSKCLLLVHEPKLKVDLTKYLENQAFCFDFAFDETASNEVVYRFTARPLVQTIFEGGKATCFAYGQTGSGKTHTMGGDLSGKAQNASKGIYAMASRDVFLLKNQPCYRKLGLEVYVTFFEIYNGKLFDLLNKKAKLRVLEDGKQQVQVVGLQEHLVNSADDVIKMIDMGSACRTSGQTFANSNSSRSHACFQIILRAKGRMHGKFSLVDLAGNERGADTSSADRQTRMEGAEINKSLLALKECIRALGQNKAHTPFRESKLTQVLRDSFIGENSRTCMIATISPGISSCEYTLNTLRYADRVKELSPHSGPSGEQLIQMETEEMEACSNGALIPGNLSKEEEELSSQMSSFNEAMTQIRELEEKAMEELKEIIQQGPDWLELSEMTEQPDYDLETFVNKAESALAQQAKHFSALRDVIKALRLAMQLEEQASRQISSKKRPQ

SEQ ID NO: 76 - protein, 1391 aa, Homo sapiens
MPSSLLGAAMPASTSAAALQEALENAGRLIDRQLQEDRMYPDLSELLMVSAPNNPTVSGMSDMDYPLQGPGLLSVPNLPEISSIRRVPLPPELVEQFGHMQCNCMMGVFPPISRAWLTIDSDIFMWNYEDGGDLAYFDGLSETILAVGLVKPKAGIFQPHVRHLLVLATPVDIVILGLSYANLQTGSGVLNDSLSGGMQLLPDPLYSLPTDNTYLLTITSTDNGRIFLAGKDGCLYEVAYQAEAGWFSQRCRKINHSKSSLSFLVPSLLQFTFSEDDPILQIAIDNSRNILYTRSEKGVIQVYDLGQDGQGMSRVASVSQNAIVSAAGNIARTIDRSVFKPIVQIAVIENSESLDCQLLAVTHAGVRLYFSTCPFRQPLARPNTLTLVHVRLPPGFSASSTVEKPSKVHRALYSKGILLMAASENEDNDILWCVNHDTFPFQKPMMETQMTAGVDGHSWALSAIDELKVDKIITPLNKDHIPITDSPVVVQQHMLPPKKFVLLSAQGSLMFHKLRPVDQLRHLLVSNVGGDGEEIERFFKLHQEDQACATCLILACSTAACDREVSAWATRAFFRYGGEAQMRFPTTLPPPSNVGPILGSPVYSSSPVPSGSPYPNPSFLGTPSHGIQPPAMSTPVCALGNPATQATNMSCVTGPEIVYSGKHNGICIYFSRIMGNIWDASLVVERIFKSGNREITAIESSVPCQLLESVLQELKGLQEFLDRNSQFAGGPLGNPNTTAKVQQRLIGFMRPENGNPQQMQQELQRKFHEAQLSEKISLQAIQQLVRKSYQALALWKLLCEHQFTIIVAELQKELQEQLKITTFKDLVIRDKELTGALIASLINCYIRDNAAVDGISLHLQDICPLLYSTDDAICSKANELLQRSRQVQNKTEKERMLRESLKEYQKISNQVDLSNVCAQYRQVRFYEGVVELSLTAAEKKDPQGLGLHFYKHGEPEEDIVGLQAFQERLNSYKCITDTLQELVNQSKAAPQSPSVPKKPGPPVLSSDPNMLSNEEAGHHFEQMLKLSQRSKDELFSIALYNWLIQVDLADKLLQVASPFLEPHLVRMAKVDQNRVRYMDLLWRYYEKNRSFSNAARVLSRLADMHSTEISLQQRLEYIARAILSAKSSTAISSIAADGEFLHELEEKMEVARIQLQIQETLQRQYSHHSSVQDAVSQLDSELMDITKLYGEFADPFKLAECKLAIIHCAGYSDPILVQTLWQDIIEKELSDSVTLSSSDRMHALSLKIVLLGKIYAGTPRFFPLDFIVQFLEQQVCTLNWDVGFVIQTMNEIGVPLPRLLEVYDQLFKSRDPFWNRMKKPLHLLDCIHVLLIRYVENPSQVLNCERRRFTNLCLDAVCGYLVELQSMSSSVAVQAITGNFKSLQAKLERLH

SEQ ID NO: 77 - protein, 747 aa, Homo sapiens
MSQVKSSYSYDAPSDFINFSSLDDEGDTQNIDSWFEEKANLENKLLGKNGTGGLFQGKTPLRKANLQQAIVTPLKPVDNTYYKEAEKENLVEQSIPSNACSSLEVEAAISRKTPAQPQRRSLRLSAQKDLEQKEKHHVKMKAKRCATPVIIDEILPSKKMKVSNNKKKPEEEGSAHQDTAEKNASSPEKAKGRHTVPCMPPAKQKFLKSTEEQELEKSMKMQQEVVEMRKKNEEFKKLALAGIGQPVKKSVSQVTKSVDFHFRTDERIKQHPKNQEEYKEVNFTSELRKHPSSPARVTKGCTIVKPFNLSQGKKRTFDETVSTYVPLAQQVEDFHKRTPNRYHLRSKKDDINLLPSKSSVTKICRDPQTPVLQTKHRARAVTCKSTAELEAEELEKLQQYKFKARELDPRILEGGPILPKKPPVKPPTEPIGFDLEIEKRIQERESKKKTEDEHFEFHSRPCPTKILEDVVGVPEKKVLPITVPKSPAFALKNRIRMPTKEDEEEDEPVVIKAQPVPHYGVPFKPQIPEARTVEICPFSFDSRDKERQLQKEKKIKELQKGEVPKFKALPLPHFDTINLPEKKVKNVTQIEPFCLETDRRGALKAQTWKHQLEEELRQQKEAACFKARPNTVISQEPFVPKKEKKSVAEGLSGSLVQEPFQLATEKRAKERQELEKRMAEVEAQKAQQLEEARLQEEEQKKEELARLRRELVHKANPIRKYQGLEIKSSDQPLTVPVSPKFSTRFHC

SEQ ID NO: 78 - protein, 857 aa, Homo sapiens
MESEDLSGRELTIDSIMNKVRDIKNKFKNEDLTDELSLNKISADTTDNSGTVNQIMMMANNPEDWLSLLLKLEKNSVPLSDALLNKLIGRYSQAIEALPPDKYGQNESFARIQVRFAELKAIQEPDDARDYFQMARANCKKFAFVHISFAQFELSQGNVKKSKQLLQKAVERGAVPLEMLEIALRNLNLQKKQLLSEEEKKNLSASTVLTAQESFSGSLGHLQNRNNSCDSRGQTTKARFLYGENMPPQDAEIGYRNSLRQTNKTKQSCPFGRVPVNLLNSPDCDVKTDDSVVPCFMKRQTSRSECRDLVVPGSKPSGNDSCELRNLKSVQNSHFKEPLVSDEKSSELIITDSITLKNKTESSLLAKLEETKEYQEPEVPESNQKQWQSKRKSECINQNPAASSNHWQIPELARKVNTEQKHTTFEQPVFSVSKQSPPISTSKWFDPKSICKTPSSNTLDDYMSCFRTPVVKNDFPPACQLSTPYGQPACFQQQQHQILATPLQNLQVLASSSANECISVKGRIYSILKQIGSGGSSKVFQVLNEKKQIYAIKYVNLEEADNQTLDSYRNEIAYLNKLQQHSDKIIRLYDYEITDQYIYMVMECGNIDLNSWLKKKKSIDPWERKSYWKNMLEAVHTIHQHGIVHSDLKPANFLIVDGMLKLIDFGIANQMQPDTTSVVKDSQVGTVNYMPPEAIKDMSSSRENGKSKSKISPKSDVWSLGCILYYMTYGKTPFQQIINQISKLHAIIDPNHEIEFPDIPEKDLQDVLKCCLKRDPKQRISIPELLAHPYVQIQTHPVNQMAKGTTEEMKYVLGQLVGLNSPNSILKAAKTLYEHYSGGESHNSSSSKTFEKKRGKK

SEQ ID NO: 79 - protein, 147 aa, Homo sapiens
MSSEPPPPPQPPTHQASVGLLDTPRSRERSPSPLRGNVVPSPLPTRRTRTFSATVRASQGPVYKGVCKCFCRSKGHGFITPADGGPDIFLHISDVEGEYVPVEGDEVTYKMCSIPPKNEKLQAVEVVITHLAPGTKHETWSGHVISS

SEQ ID NO: 80 - protein, 140 aa, Homo sapiens
MGPRRRSRKPEAPRRRSPSPTPTPGPSRRGPSLGASSHQHSRRRQGWLKEIRKLQKSTHLLIRKLPFSRLAREICVKFTRGVDFNWQAQALLALQEAAEAFLVHLFEDAYLLTLHAGRVTLFPKDVQLARRIRGLEEGLG

SEQ ID NO: 81 - protein, 339 aa, Homo sapiens
MDETVAEFIKRTILKIPMNELTTILKAWDFLSENQLQTVNFRQRKESVVQHLIHLCEEKRASISDAALLDIIYMQFHQHQKVWEVFQMSKGPGEDVDLFDMKQFKNSFKKILQRALKNVTVSFRETEENAVWIRIAWGTQYTKPNQYKPTYVVYYSQTPYAFTSSSMLRRNTPLLGQALTIASKHHQIVKMDLRSRYLDSLKAIVFKQYNQTFETHNSTTPLQERSLGLDINMDSRIIHENIVEKERVQRITQETFGDYPQPQLEFAQYKLETKFKSGLNGSILAEREEPLRCLIKFSSPHLLEALKSLAPAGIADAPLSPLLTCIPNKRMNYFKIRDK

SEQ ID NO: 82 - protein, 846 aa, Homo sapiens
MGIQGLLQFIKEASEPIHVRKYKGQVVAVDTYCWLHKGAIACAEKLAKGEPTDRYVGFCMKFVNMLLSHGIKPILVFDGCTLPSKKEVERSRRERRQANLLKGKQLLREGKVSEARECFTRSINITHAMAHKVIKAARSQGVDCLVAPYEADAQLAYLNKAGIVQAIITEDSDLLAFGCKKVILKMDQFGNGLEIDQARLGMCRQLGDVFTEEKFRYMCILSGCDYLSSLRGIGLAKACKVLRLANNPDIVKVIKKIGHYLKMNITVPEDYINGFIRANNTFLYQLVFDPIKRKLIPLNAYEDDVDPETLSYAGQYVDDSIALQIALGNKDINTFEQIDDYNPDTAMPAHSRSHSWDDKTCQKSANVSSIWHRNYSPRPESGTVSDAPQLKENPSTVGVERVISTKGLNLPRKSSIVKRPRSAELSEDDLLSQYSLSFTKKTKKNSSEGNKSLSFSEVFVPDLVNGPTNKKSVSTPPRTRNKFATFLQRKNEESGAVVVPGTRSRFFCSSDSTDCVSNKVSIQPLDETAVTDKENNLHESEYGDQEGKRLVDTDVARNSSDDIPNNHIPGDHIPDKATVFTDEESYSFESSKFTRTISPPTLGTLRSCFSWSGGLGDFSRTPSPSPSTALQQFRRKSDSPTSLPENNMSDVSQLKSEESSDDESHPLREEACSSQSQESGEFSLQSSNASKLSQCSSKDSDSEESDCNIKLLDSQSDQTSKLRLSHFSKKDTPLRNKVPGLYKSSSADSLSTTKIKPLGPARASGLSKKPASIQKRKHHNAENKPGLQIKLNELWKNFGFKKDSEKLPPCKKPLSPVRDNIQLTPEAEEDIFNKPECGRVQRAIFQ

SEQ ID NO: 83 - protein, 268 aa, Homo sapiens
MAVNVYSTSVTSDNLSRHDMLAWINESLQLNLTKIEQLCSGAAYCQFMDMLFPGSIALKKVKFQAKLEHEYIQNFKILQAGFKRMGVDKIIPVDKLVKGKFQDNFEFVQWFKKFFDANYDGKDYDPVAARQGQETAVAPSLVAPALNKPKKPLTSSSAAPQRPISTQRTAAAPKAGPGVVRKNPGVGNGDDEAAELMQQVNVLKLTVEDLEKERDFYFGKLRNIELICQENEGENDPVLQRIVDILYATDEGFVIPDEGGPQEEQEEY

SEQ ID NO: 84 - protein, 882 aa, Homo sapiens
MEPAPARSPRPQQDPARPQEPTMPPPETPSEGRQPSPSPSPTERAPASEEEFQFLRCQQCQAEAKCPKLLPCLHTLCSGCLEASGMQCPICQAPWPLGADTPALDNVFFESLQRRLSVYRQIVDAQAVCTRCKESADFWCFECEQLLCAKCFEAHQWFLKHEARPLAELRNQSVREFLDGTRKTNNIFCSNPNHRTPTLTSIYCRGCSKPLCCSCALLDSSHSELKCDISAEIQQRQEELDAMTQALQEQDSAFGAVHAQMHAAVGQLGRARAETEELIRERVRQVVAHVRAQERELLEAVDARYQRDYEEMASRLGRLDAVLQRIRTGSALVQRMKCYASDQEVLDMHGFLRQALCRLRQEEPQSLQAAVRTDGFDEFKVRLQDLSSCITQGKDAAVSKKASPEAASTPRDPIDVDLPEEAERVKAQVQALGLAEAQPMAVVQSVPGAHPVPVYAFSIKGPSYGEDVSNTTTAQKRKCSQTQCPRKVIKMESEEGKEARLARSSPEQPRPSTSKAVSPPHLDGPPSPRSPVIGSEVFLPNSNHVASGAGEAEERVVVISSSEDSDAENSSSRELDDSSSESSDLQLEGPSTLRVLDENLADPQAEDRPLVFFDLKIDNETQKISQLAAVNRESKFRVVIQPEAFFSIYSKAVSLEVGLQHFLSFLSSMRRPILACYKLWGPGLPNFFRALEDINRLWEFQEAISGFLAALPLIRERVPGASSFKLKNLAQTYLARNMSERSAMAAVLAMRDLCRLLEVSPGPQLAQHVYPFSSLQCFASLQPLVQAAVLPRAEARLLALHNVSFMELLSAHRRDRQGGLKKYSRYLSLQTTTLPPAQPAFNLQALGTYFEGLLEGPALARAEGVSTPLAGRGLAERASQQS

SEQ ID NO: 85 - protein, 199 aa, Homo sapiens
MEASPASGPRHLMDPHIFTSNFNNGIGRHKTYLCYEVERLDNGTSVKMDQHRGFLHNQAKNLLCGFYGRHAELRFLDLVPSLQLDPAQIYRVTWFISWSPCFSWGCAGEVRAFLQENTHVRLRIFAARIYDYDPLYKEALQMLRDAGAQVSIMTYDEFKHCWDTFVDHQGCPFQPWDGLDEHSQALSGRLRAILQNQGN

SEQ ID NO: 86 - protein, 125 aa, Homo sapiens
MPHSSDSSDSSFSRSPPPGKQDSSDDVRRVQRREKNRIAAQKSRQRQTQKADTLHLESEDLEKQNAALRKEIKQLTEELKYFTSVLNSHEPLCSVLAASTPSPPEVVYSAHAFHQPHVSSPRFQP

SEQ ID NO: 87 - protein, 327 aa, Homo sapiens
MLFLLLPLLAVLPGDGNADGLKEPLSFHVTWIASFYNHSWKQNLVSGWLSDLQTHTWDSNSSTIVFLCPWSRGNFSNEEWKELETLFRIRTIRSFEGIRRYAHELQFEYPFEIQVTGGCELHSGKVSGSFLQLAYQGSDFVSFQNNSWLPYPVAGNMAKHFCKVLNQNQHENDITHNLLSDTCPRFILGLLDAGKAHLQRQVKPEAWLSHGPSPGPGHLQLVCHVSGFYPKPVWVMWMRGEQEQQGTQRGDILPSADGTWYLRATLEVAAGEAADLSCRVKHSSLEGQDIVLYWEHHSSVGFIILAVIVPLLLLIGLALWFRKRCFC

SEQ ID NO: 88 - protein, 333 aa, Homo sapiens
MLLLPFQLLAVLFPGGNSEHAFQGPTSFHVIQTSSFTNSTWAQTQGSGWLDDLQIHGWDSDSGTAIFLKPWSKGNFSDKEVAELEEIFRVYIFGFAREVQDFAGDFQMKYPFEIQGIAGCELHSGGAIVSFLRGALGGLDFLSVKNASCVPSPEGGSRAQKFCALIIQYQGIMETVRILLYETCPRYLLGVLNAGKADLQRQVKPEAWLSSGPSPGPGRLQLVCHVSGFYPKPVWVMWMRGEQEQQGTQLGDILPNANWTWYLRATLDVADGEAAGLSCRVKHSSLEGQDIILYWRNPTSIGSIVLAIIVPSLLLLLCLALWYMRRRSYQNIP

SEQ ID NO: 89 - protein, 333 aa, Homo sapiens
MLFLQFLLLALLLPGGDNADASQEHVSFHVIQIFSFVNQSWARGQGSGWLDELQTHGWDSESGTIIFLHNWSKGNFSNEELSDLELLFRFYLFGLTREIQDHASQDYSKYPFEVQVKAGCELHSGKSPEGFFQVAFNGLDLLSFQNTTWVPSPGCGSLAQSVCHLLNHQYEGVTETVYNLIRSTCPRFLLGLLDAGKMYVHRQVRPEAWLSSRPSLGSGQLLLVCHASGFYPKPVWVTWMRNEQEQLGTKHGDILPNADGTWYLQVILEVASEEPAGLSCRVRHSSLGGQDIILYWGHHFSMNWIALVVIVPLVILIVLVLWFKKHCSYQDIL

SEQ ID NO: 90 - protein, 388 aa, Homo sapiens
MLLLFLLFEGLCCPGENTAAPQALQSYHLAAEEQLSFRMLQTSSFANHSWAHSEGSGWLGDLQTHGWDTVLGTIRFLKPWSHGNFSKQELKNLQSLFQLYFHSFIQIVQASAGQFQLEYPFEIQILAGCRMNAPQIFLNMAYQGSDFLSFQGISWEPSPGAGIRAQNICKVLNRYLDIKEILQSLLGHTCPRFLAGLMEAGESELKRKVKPEAWLSCGPSPGPGRLQLVCHVSGFYPKPVWVMWMRGEQEQRGTQRGDVLPNADETWYLRATLDVAAGEAAGLSCRVKHSSLGGHDLIIHWGGYSIFLILICLTVIVTLVILVVVDSRLKKQSSNKNILSPHTPSPVFLMGANTQDTKNSRHQFCLAQVSWIKNRVLKKWKTRLNQLW

SEQ ID NO: 91 - protein, 764 aa, Homo sapiens
MGSNLSPQLCLMPFILGLLSGGVTTTPWSLARPQGSCSLEGVEIKGGSFRLLQEGQALEYVCPSGFYPYPVQTRTCRSTGSWSTLKTQDQKTVRKAECRAIHCPRPHDFENGEYWPRSPYYNVSDEISFHCYDGYTLRGSANRTCQVNGRWSGQTAICDNGAGYCSNPGIPIGTRKVGSQYRLEDSVTYHCSRGLTLRGSQRRTCQEGGSWSGTEPSCQDSFMYDTPQEVAEAFLSSLTETIEGVDAEDGHGPGEQQKRKIVLDPSGSMNIYLVLDGSDSIGASNFTGAKKCLVNLIEKVASYGVKPRYGLVTYATYPKIWVKVSEADSSNADWVTKQLNEINYEDHKLKSGTNTKKALQAVYSMMSWPDDVPPEGWNRTRHVIILMTDGLHNMGGDPITVIDEIRDLLYIGKDRKNPREDYLDVYVFGVGPLVNQVNINALASKKDNEQHVFKVKDMENLEDVFYQMIDESQSLSLCGMVWEHRKGTDYHKQPWQAKISVIRPSKGHESCMGAVVSEYFVLTAAHCFTVDDKEHSIKVSVGGEKRDLEIEVVLFHPNYNINGKKEAGIPEFYDYDVALIKLKNKLKYGQTIRPICLPCTEGTTRALRLPPTTTCQQQKEELLPAQDIKALFVSEEEKKLTRKEVYIKNGDKKGSCERDAQYAPGYDKVKDISEVVTPRFLCTGGVSPYADPNTCRGDSGGPLIVHKRSRFIQVGVISWGVVDVCKNQKRQKQVPAHARDFHINLFQVLPWLKEKLQDEDLGFL

SEQ ID NO: 92 - protein, 352 aa, Homo sapiens
MEGISIYTSDNYTEEMGSGDYDSMKEPCFREENANFNKIFLPTIYSIIFLTGIVGNGLVILVMGYQKKLRSMTDKYRLHLSVADLLFVITLPFWAVDAVANWYFGNFLCKAVHVIYTVNLYSSVLILAFISLDRYLAIVHATNSQRPRKLLAEKVVYVGVWIPALLLTIPDFIFANVSEADDRYICDRFYPNDLWVVVFQFQHIMVGLILPGIVILSCYCIIISKLSHSKGHQKRKALKTTVILILAFFACWLPYYIGISIDSFILLEIIKQGCEFENTVHKWISITEALAFFHCCLNPILYAFLGAKFKTSAQHALTSVSRGSSLKILSKGKRGGHSSVSTESESSSFHSS

SEQ ID NO: 93 - protein, 416 aa, Homo sapiens
MSEQSICQARASVMVYDDTSKKWVPIKPGQQGFSRINIYHNTASNTFRVVGVKLQDQQVVINYSIVKGLKYNQATPTFHQWRDARQVYGLNFASKEEATTFSNAMLFALNIMNSQEGGPSSQRQVQNGPSPDEMDIQRRQVMEQHQQQRQESLERRTSATGPILPPGHPSSAASAPVSCSGPPPPPPPPVPPPPTGATPPPPPPLPAGGAQGSSHDESSMSGLAAAIAGAKLRRVQRPEDASGGSSPSGTSKSDANRASSGGGGGGLMEEMNKLLAKRRKAASQSDKPAEKKEDESQMEDPSTSPSPGTRAASQPPNSSEAGRKPWERSNSVEKPVSSILSRTPSVAKSPEAKSPLQSQPHSRMKPAGSVNDMALDAFDLDRMKQEILEEVVRELHKVKEEIIDAIRQELSGISTT

SEQ ID NO: 94 - protein, 412 aa, Homo sapiens
MAAAAGEEEEEEEAARESAARPAAGPALWRLPEELLLLICSYLDMRALGRLAQVCRWLRRFTSCDLLWRRIARASLNSGFTRLGTDLMTSVPVKERVKVSQNWRLGRCREGILLKWRCSQMPWMQLEDDSLYISQANFILAYQFRPDGASLNRRPLGVFAGHDEDVCHFVLANSHIVSAGGDGKIGIHKIHSTFTVKYSAHEQEVNCVDCKGGIIVSGSRDRTAKVWPLASGRLGQCLHTIQTEDRVWSIAISPLLSSFVTGTACCGHFSPLRIWDLNSGQLMTHLGSDFPPGAGVLDVMYESPFTLLSCGYDTYVRYWDLRTSVRKCVMEWEEPHDSTLYCLQTDGNHLLATGSSYYGVVRLWDRRQRACLHAFPLTSTPLSSPVYCLRLTTKHLYAALSYNLHVLDFQNP

SEQ ID NO: 95 - protein, 362 aa, Homo sapiens
MLVMAPRTVLLLLSAALALTETWAGSHSMRYFYTSVSRPGRGEPRFISVGYVDDTQFVRFDSDAASPREEPRAPWIEQEGPEYWDRNTQIYKAQAQTDRESLRNLRGYYNQSEAGSHTLQSMYGCDVGPDGRLLRGHDQYAYDGKDYIALNEDLRSWTAADTAAQITQRKWEAAREAEQRRAYLEGECVEWLRRYLENGKDKLERADPPKTHVTHHPISDHEATLRCWALGFYPAEITLTWQRDGEDQTQDTELVETRPAGDRTFQKWAAVVVPSGEEQRYTCHVQHEGLPKPLTLRWEPSSQSTVPIVGIVAGLAVLAVVVIGAVVAAVMCRRKSSGGKGGSYSQAACSDSAQGSDVSLTA

SEQ ID NO: 96 - protein, 465 aa, Homo sapiens [sequence omitted]

SEQ ID NO: 97 - protein, 341 aa, Homo sapiens
MSLMVVSMVCVGFFLLQGAWPHEGVHRKPSLLAHPGPLVKSEETVILQCWSDVRFQHFLLHREGKFKDTLHLIGEHHDGVSKANFSIGPMMQDLAGTYRCYGSVTHSPYQLSAPSDPLDIVITGLYEKPSLSAQPGPTVLAGESVTLSCSSRSSYDMYHLSREGEAHERRFSAGPKVNGTFQADFPLGPATHGGTYRCFGSFRDSPYEWSNSSDPLLVSVTGNPSNSWPSPTEPSSETGNPRHLHVLIGTSVVIILFILLLFFLLHRWCCNKKNAVVMDQEPAGNRTVNREDSDEQDPQEVTYAQLNHCVFTQRKITRPSQRPKTPPTDIIVYTELPNAEP

SEQ ID NO: 98 - protein, 455 aa, Homo sapiens
MRLLAWLIFLANWGGARAEPGKFWHIADLHLDPDYKVSKDPFQVCPSAGSQPVPDAGPWGDYLCDSPWALINSSIYAMKEIEPEPDFILWTGDDTPHVPDEKLGEAAVLEIVERLTKLIREVFPDTKVYAALGNHDFHPKNQFPAGSNNIYNQIAELWKPWLSNESIALFKKGAFYCEKLPGPSGAGRIVVLNTNLYYTSNALTADMADPGQQFQWLEDVLTDASKAGDMVYIVGHVPPGFFEKTQNKAWFREGFNEKYLKVVRKHHRVIAGQFFGHHHTDSFRMLYDDAGVPISAMFITPGVTPWKTTLPGVVNGANNPAIRVFEYDRATLSLKDMVTYFMNLSQANAQGTPRWELEYQLTEAYGVPDASAHSMHTVLDRIAGDQSTLQRYYVYNSVSYSAGVCDEACSMQHVCAMRQVDIDAYTTCLYASGTTPVPQLPLLLMALLGLCTLVL

SEQ ID NO: 99 - protein, 380 aa, Homo sapiens
MKLLARALRLCEFGRQASSRRLVAGQGCVGPRRGCCAPVQVVGPRADLPPCGACITGRIMRPDDANVAGNVHGGTILKMIEEAGAIISTRHCNSQNGERCVAALARVERTDFLSPMCIGEVAHVSAEITYTSKHSVEVQVNVMSENILTGAKKLTNKATLWYVPLSLKNVDKVLEVPPVVYSRQEQEEEGRKRYEAQKLERMETKWRNGDIVQPVLNPEPNTVSYSQSSLIHLVGPSDCTLHGFVHGGVTMKLMDEVAGIVAARHCKTNIVTASVDAINFHDKIRKGCVITISGRMTFTSNKSMEIEVLVDADPVVDSSQKRYRAASAFFTYVSLSQEGRSLPVPQLVPETEDEKKRFEEGKGRYLQMKAKRQGHAEPQP

SEQ ID NO: 100 - protein, 472 aa, Homo sapiens
MGCDRNCGLIAGAVIGAVLAVFGGILMPVGDLLIQKTIKKQVVLEEGTIAFKNWVKTGTEVYRQFWIFDVQNPQEVMMNSSNIQVKQRGPYTYRVRFLAKENVTQDAEDNTVSFLQPNGAIFEPSLSVGTEADNFTVLNLAVAAASHIYQNQFVQMILNSLINKSKSSMFQVRTLRELLWGYRDPFLSLVPYPVTTTVGLFYPYNNTADGVYKVFNGKDNISKVAIIDTYKGKRNLSYWESHCDMINGTDAASFPPFVEKSQVLQFFSSDICRSIYAVFESDVNLKGIPVYRFVLPSKAFASPVENPDNYCFCTEKIISKNCTSYGVLDISKCKEGRPVYISLPHFLYASPDVSEPIDGLNPNEEEHRTYLDIEPITGFTLQFAKRLQVNLLVKPSEKIQVLKNLKRNYIVPILWLNETGTIGDEKANMFRSQVTGKINLLGLIEMILLSVGVVMFVAFMISYCACRSKTIK

SEQ ID NO: 101 - protein, 381 aa, Homo sapiens
MTVARPSVPAALPLLGELPRLLLLVLLCLPAVWGDCGLPPDVPNAQPALEGRTSFPEDTVITYKCEESFVKIPGEKDSVICLKGSQWSDIEEFCNRSCEVPTRLNSASLKQPYITQNYFPVGTVVEYECRPGYRREPSLSPKLTCLQNLKWSTAVEFCKKKSCPNPGEIRNGQIDVPGGILFGATISFSCNTGYKLFGSTSSFCLISGSSVQWSDPLPECREIYCPAPPQIDNGIIQGERDHYGYRQSVTYACNKGFTMIGEHSIYCTVNNDEGEWSGPPPECRGKSLTSKVPPTVQKPTTVNVPTTEVSPTSQKTTTKTTTPNAQATRSTPVSRTTKHFHETTPNKGSGTTSGTTRLLSGHTCFTLTGLLGTLVTMGLLT

SEQ ID NO: 102 - protein, 1058 aa, Homo sapiens
MDLGPLNICEEMTILHGGFLLAEQLFHPKALAELTKSDWERVGRPIVEALREISSAAAHSQPFAWKKKALIIIWAKVLQPHPVTPSDTETRWQEDLFFSVGNMIPTINHTILFELLKSLEASGLFIQLLMALPTTICHAELERFLEHVTVDTSAEDVAFFLDVWWEVMKHKGHPQDPLLSQFSAMAHKYLPALDEFPHPPKRLRSDPDACPTMPLLAMLLRGLTQIQSRILGPGRKCCALANLADMLTVFALTEDDPQEVSATVYLDKLATVISVWNSDTQNPYHQQALAEKVKEAERDVSLTSLAKLPSETIFVGCEFLHHLLREWGEELQAVLRSSQGTSYDSYRLCDSLTSFSQNATLYLNRTSLSKEDRQVVSELAECVRDFLRKTSTVLKNRALEDITASIAMAVIQQKMDRHMEVCYIFASEKKWAFSDEWVACLGSNRALFRQPDLVLRLLETVIDVSTADRAIPESQIRQVIHLILECYADLSLPGKNKVLAGILRSWGRKGLSEKLLAYVEGFQEDLNTTFNQLTQSASEQGLAKAVASVARLVIVHPEVTVKKMCSLAVVNLGTHKFLAQILTAFPALRFVEEQGPNSSATFMVSCLKETVWMKFSTPKEEKQFLELLNCLMSPVKPQGIPVAALLEPDEVLKEFVLPFLRLDVEEVDLSLRIFIQTLEANACREEYWLQTCSPFPLLFSLCQLLDRFSKYWQLPKEKRCLSLDRKDLAIHILELLCEIVSANAETFSPDVWIKSLSWLHRKLEQLDWTVGLRLKSFFEGHFKCEVPATLFEICKLSEDEWTSQAHPGYGAGTGLLAWMECCCVSSGISERMLSLLVVDVGNPEEVRLFSKGFLVALVQVMPWCSPQEWQRLHQLTRRLLEKQLLHVPYSLEYIQFVPLLNLKPFAQELQLSVLFLRTFQFLCSHSCRDWLPLEGWNHVVKLLCGSLTRLLDSVRAIQAAGPWVQGPEQDLTQEALFVYTQVFCHALHIMAMLHPEVCEPLYVLALETLTCYETLSKTNPSVSSLLQRAHEQRFLKSIAEGIGPEERRQTLLQKMSSF

SEQ ID NO: 103 - protein, 534 aa, Homo sapiens
MAQLGKLLKEQKYDRQLRLWGDHGQEALESAHVCLINATATGTEILKNLVLPGIGSFTIIDGNQVSGEDAGNNFFLQRSSIGKNRAEAAMEFLQELNSDVSGSFVEESPENLLDNDPSFFCRFTVVVATQLPESTSLRLADVLWNSQIPLLICRTYGLVGYMRIIIKEHPVIESHPDNALEDLRLDKPFPELREHFQSYDLDHMEKKDHSHTPWIVIIAKYLAQWYSETNGRIPKTYKEKEDFRDLIRQGILKNENGAPEDEENFEEAIKNVNTALNTTQIPSSIEDIFNDDRCINITKQTPSFWILARALKEFVAKEGQGNLPVRGTIPDMIADSGKYIKLQNVYREKAKKDAAAVGNHVAKLLQSIGQAPESISEKELKLLCSNSAFLRVVRCRSLAEEYGLDTINKDEIISSMDNPDNEIVLYLMLRAVDRFHKQQGRYPGVSNYQVEEDIGKLKSCLTGFLQEYGLSVMVKDDYVHEFCRYGAAEPHTIAAFLGGAAAQEVIKIITKQFVIFNNTYIYSGMSQTSATFQL

SEQ ID NO: 104 - protein, 504 aa, Homo sapiens
MLYFSLFWAARPLQRCGQLVRMAIRAQHSNAAQTQTGEANRGWTGQESLSDSDPEMWELLQREKDRQCRGLELIASENFCSRAALEALGSCLNNKYSEGYPGKRYYGGAEVVDEIELLCQRRALEAFDLDPAQWGVNVQPYSGSPANLAVYTALLQPHDRIMGLDLPDGGHLTHGYMSDVKRISATSIFFESMPYKLNPKTGLIDYNQLALTARLFRPRLIIAGTSAYARLIDYARMREVCDEVKAHLLADMAHISGLVAAKVIPSPFKHADIVTTTTHKTLRGARSGLIFYRKGVKAVDPKTGREIPYTFEDRINFAVFPSLQGGPHNHAIAAVAVALKQACTPMFREYSLQVLKNARAMADALLERGYSLVSGGTDNHLVLVDLRPKGLDGARAERVLELVSITANKNTCPGDRSAITPGGLRLGAPALTSRQFREDDFRRVVDFIDEGVNIGLEVKSKTAKLQDFKSFLLKDSETSQRLANLRQRVEQFARAFPMPGFDEH

SEQ ID NO: 105 - protein, 556 aa, Homo sapiens
MEGPLSVFGDRSTGETIRSQNVMAAASIANIVKSSLGPVGLDKMLVDDIGDVTITNDGATILKLLEVEHPAAKVLCELADLQDKEVGDGTTSVVIIAAELLKNADELVKQKIHPTSVISGYRLACKEAVRYINENLIVNTDELGRDCLINAAKTSMSSKIIGINGDFFANMVVDAVLAIKYTDIRGQPRYPVNSVNILKAHGRSQMESMLISGYALNCVVGSQGMPKRIVNAKIACLDFSLQKTKMKLGVQVVITDPEKLDQIRQRESDITKERIQKILATGANVILTTGGIDDMCLKYFVEAGAMAVRRVLKRDLKRIAKASGATILSTLANLEGEETFEAAMLGQAEEVVQERICDDELILIKNTKARTSASIILRGANDFMCDEMERSLHDALCVVKRVLESKSVVPGGGAVEAALSIYLENYATSMGSREQLAIAEFARSLLVIPNTLAVNAAQDSTDLVAKLRAFHNEAQVNPERKNLKWIGLDLSNGKPRDNKQAGVFEPTIVKVKSLKFATEAAITILRIDDLIKLHPESKDDKHGSYEDAVHSGALND

SEQ ID NO: 106 - protein, 105 aa, Homo sapiens
MVKQIESKTAFQEALDAAGDKLVVVDFSATWCGPCKMIKPFFHSLSEKYSNVIFLEVDVDDCQDVASECEVKCMPTFQFFKKGQKVGEFSGANKEKLEATINELV

SEQ ID NO: 107 - protein, 647 aa, Homo sapiens
MGCAEGKAVAAAAPTELQTKGKNGDGRRRSAKDHHPGKTLPENPAGFTSTATADSRALLQAYIDGHSVVIFSRSTCTRCTEVKKLFKSLCVPYFVLELDQTEDGRALEGTLSELAAETDLPVVFVKQRKIGGHGPTLKAYQEGRLQKLLKMNGPEDLPKSYDYDLIIIGGGSGGLAAAKEAAQYGKKVMVLDFVTPTPLGTRWGLGGTCVNVGCIPKKLMHQAALLGQALQDSRNYGWKVEETVKHDWDRMIEAVQNHIGSLNWGYRVALREKKVVYENAYGQFIGPHRIKATNNKGKEKIYSAERFLIATGERPRYLGIPGDKEYCISSDDLFSLPYCPGKTLVVGASYVALECAGFLAGIGLDVTVMVRSILLRGFDQDMANKIGEHMEEHGIKFIRQFVPIKVEQIEAGTPGRLRVVAQSTNSEEIIEGEYNTVMLAIGRDACTRKIGLETVGVKINEKTGKIPVTDEEQTNVPYIYAIGDILEDKVELTPVAIQAGRLLAQRLYAGSTVKCDYENVPTTVFTPLEYGACGLSEEKAVEKFGEENIEVYHSYFWPLEWTIPSRDNNKCYAKIICNTKDNERVVGFHVLGPNAGEVTQGFAAALKCGLTKKQLDSTIGIHPVCAEVFTTLSVTKRSGASILQAGC

SEQ ID NO: 108 - protein, 1280 aa, Homo sapiens
MDLEGDRNGGAKKKNFFKLNNKSEKDKKEKKPTVSVFSMFRYSNWLDKLYMVVGTLAAIIHGAGLPLMMLVFGEMTDIFANAGNLEDLMSNITNRSDINDTGFFMNLEEDMTRYAYYYSGIGAGVLVAAYIQVSFWCLAAGRQIHKIRKQFFHAIMRQEIGWFDVHDVGELNTRLTDDVSKINEGIGDKIGMFFQSMATFFTGFIVGFTRGWKLTLVILAISPVLGLSAAVWAKILSSFTDKELLAYAKAGAVAEEVLAAIRTVIAFGGQKKELERYNKNLEEAKRIGIKKAITANISIGAAFLLIYASYALAFWYGTTLVLSGEYSIGQVLTVFFSVLIGAFSVGQASPSIEAFANARGAAYEIFKIIDNKPSIDSYSKSGHKPDNIKGNLEFRNVHFSYPSRKEVKILKGLNLKVQSGQTVALVGNSGCGKSTTVQLMQRLYDPTEGMVSVDGQDIRTINVRFLREIIGVVSQEPVLFATTIAENIRYGRENVTMDEIEKAVKEANAYDFIMKLPHKFDTLVGERGAQLSGGQKQRIAIARALVRNPKILLLDEATSALDTESEAVVQVALDKARKGRTTIVIAHRLSTVRNADVIAGFDDGVIVEKGNHDELMKEKGIYFKLVTMQTAGNEVELENAADESKSEIDALEMSSNDSRSSLIRKRSTRRSVRGSQAQDRKLSTKEALDESIPPVSFWRIMKLNLTEWPYFVVGVFCAIINGGLQPAFAIIFSKIIGVFTRIDDPETKRQNSNLFSLLFLALGIISFITFFLQGFTFGKAGEILTKRLRYMVFRSMLRQDVSWFDDPKNTTGALTTRLANDAAQVKGAIGSRLAVITQNIANLGTGIIISFIYGWQLTLLLLAIVPIIAIAGVVEMKMLSGQALKDKKELEGSGKIATEAIENFRTVVSLTQEQKFEHMYAQSLQVPYRNSLRKAHIFGITFSFTQAMMYFSYAGCFRFGAYLVAHKLMSFEDVLLVFSAVVFGAMAVGQVSSFAPDYAKAKISAAHIIMIIEKTPLIDSYSTEGLMPNTLEGNVTFGEVVFNYPTRPDIPVLQGLSLEVKKGQTLALVGSSGCGKSTVVQLLERFYDPLAGKVLLDGKEIKRLNVQWLRAHLGIVSQEPILFDCSIAENIAYGDNSRVVSQEEIVRAAKEANIHAFIESLPNKYSTKVGDKGTQLSGGQKQRIAIARALVRQPHILLLDEATSALDTESEKVVQEALDKAREGRTCIVIAHRLSTIQNADLIVVFQNGRVKEHGTHQQLLAQKGIYFSMVSVQAGTKRQ

SEQ ID NO: 109 - protein, 640 aa, Homo sapiens
MARRPRHSIYSSDEDDEDFEMCDHDYDGLLPKSGKRHLGKTRWTREEDEKLKKLVEQNGTDDWKVIANYLPNRTDVQCQHRWQKVLNPELIKGPWTKEEDQRVIELVQKYGPKRWSVIAKHLKGRIGKQCRERWHNHLNPEVKKTSWTEEEDRIIYQAHKRLGNRWAEIAKLLPGRTDNAIKNHWNSTMRRKVEQEGYLQESSKASQPAVATSFQKNSHLMGFAQAPPTAQLPATGQPTVNNDYSYYHISEAQNVSSHVPYPVALHVNIVNVPQPAAAAIQRHYNDEDPEKEKRIKELELLLMSTENELKGQQVLPTQNHTCSYPGWHSTTIADHTRPHGDSAPVSCLGEHHSTPSLPADPGSLPEESASPARCMIVHQGTILDNVKNLLEFAETLQFIDSFLNTSSNHENSDLEMPSLTSTPLIGHKLTVTTPFHRDQTVKTQKENTVFRTPAIKRSILESSPRTPTPFKHALAAQEIKYGPLKMLPQTPSHLVEDLQDVIKQESDESGIVAEFQENGPPLLKKIKQEVESPTDKSGNFFCSHHWEGDSLNTQLFTQTSPVADAPNILTSSVLMAPASEDEDNVLKAFTVPKNRSLASPLQPCSSTWEPASCGKMEEQMTSSSQARKYVNAFSARTLVM

SEQ ID NO: 110 - protein, 185 aa, Homo sapiens
MPRLFLFHLLEFCLLLNQFSRAVAAKWKDDVIKLCGRELVRAQIAICGMSTWSKRSLSQEDAPQTPRPVAEIVPSFINKDTETIIIMLEFIANLPPELKAALSERQPSLPELQQYVPALKDSNLSFEEFKKLIRNRQSEAADSNPSELKYLGLDTHSQKKRRPYVALFEKCCLIGCTKRSLAKYC

SEQ ID NO: 111 - protein, 424 aa, Homo sapiens
MQRLQVVLGHLRGPADSGWMPQAAPCLSGAPQASAADVVVVHGRRTAICRAGRGGFKDTTPDELLSAVMTAVLKDVNLRPEQLGDICVGNVLQPGAGAIMARIAQFLSDIPETVPLSTVNRQCSSGLQAVASIAGGIRNGSYDIGMACGVESMSLADRGNPGNITSRLMEKEKARDCLIPMGITSENVAERFGISREKQDTFALASQQKAARAQSKGCFQAEIVPVTTTVHDDKGTKRSITVTQDEGIRPSTTMEGLAKLKPAFKKDGSTTAGNSSQVSDGAAAILLARRSKAEELGLPILGVLRSYAVVGVPPDIMGIGPAYAIPVALQKAGLTVSDVDIFEINEAFASQAAYCVEKLRLPPEKVNPLGGAVALGHPLGCTGARQVITLLNELKRRGKRAYGVVSMCIGTGMGAAAVFEYPGN

SEQ ID NO: 112 - protein, 359 aa, Homo sapiens
MVRPMLLLSLGLLAGLLPALAACPQNCHCHSDLQHVICDKVGLQKIPKVSEKTKLLNLQRNNFPVLAANSFRAMPNLVSLHLQHCQIREVAAGAFRGLKQLIYLYLSHNDIRVLRAGAFDDLTELTYLYLDHNKVTELPRGLLSPLVNLFILQLNNNKIRELRAGAFQGAKDLRWLYLSENALSSLQPGALDDVENLAKFHVDRNQLSSYPSAALSKLRVVEELKLSHNPLKSIPDNAFQSFGRYLETLWLDNTNLEKFSDGAFLGVTTLKHVHLENNRLNQLPSNFPFDSLETLALTNNPWKCTCQLRGLRRWLEAKASRPDATCASPAKFKGQHIRDTDAFRSCKFPTKRSKKAGRH

SEQ ID NO: 113 - protein, 660 aa, Homo sapiens
MEHIRTPKVENVRLVDRVSPKKAALGTLYLTATHVIFVENSPDPRKETWILHSQISTIEKQATTATGCPLLIRCKNFQIIQLIIPQERDCHDVYISLIRLARPVKYEELYCFSFNPMLDKEEREQGWVLIDLSEEYTRMGLPNHYWQLSDVNRDYRVCDSYPTELYVPKSATAHIIVGSSKFRSRRRFPVLSYYYKDNHASICRSSQPLSGFSARCLEDEQMLQAIRKANPGSDFVYVVDTRPKLNAMANRAAGKGYENEDNYSNIKFQFIGIENIHVMRNSLQKMLEVCELKSPSMSDFLWGLENSGWLRHIKAIMDAGIFIAKAVSEEGASVLVHCSDGWDRTAQVCSVASLLLDPHYRTLKGFMVLIEKDWISFGHKFNHRYGNLDGDPKEISPVIDQFIECVWQLMEQFPCAFEFNERFLIHIQHHIYSCQFGNFLCNSQKERRELKIQERTYSLWAHLWKNRADYLNPLFRADHSQTQGTLHLPTTPCNFMYKFWSGMYNRFEKGMQPRQSVTDYLMAVKEETQQLEEELEALEERLEKIQKVQLNCTKVKSKQSEPSKHSGFSTSDNSIANTPQDYSGNMKSFPSRSPSQGDEDSALILTQDNLKSSDPDLSANSDQESGVEDLSCRSPSGGEHAPSEDSGKDRDSDEAVFLTA

SEQ ID NO: 114 - protein, 469 aa, Homo sapiens
MDVENEQILNVNPADPDNLSDSLFSGDEENAGTEEIKNEINGNWISASSINEARINAKAKRRLRKNSSRDSGRGDSVSDSGSDALRSGLTVPTSPKGRLLDRRSRSGKGRGLPKKGGAGGKGVWGTPGQVYDVEEVDVKDPNYDDDQENCVYETVVLPLDERAFEKTLTPIIQEYFEHGDTNEVAEMLRDLNLGEMKSGVPVLAVSLALEGKASHREMTSKLLSDLCGTVMSTTDVEKSFDKLLKDLPELALDTPRAPQLVGQFIARAVGDGILCNTYIDSYKGTVDCVQARAALDKATVLLSMSKGGKRKDSVWGSGGGQQSVNHLVKEIDMLLKEYLLSGDISEAEHCLKELEVPHFHHELVYEAIIMVLESTGESTFKMILDLLKSLWKSSTITVDQMKRGYERIYNEIPDINLDVPHSYSVLERFVEECFQAGIISKQLRDLCPSRGRKRFVSEGDGGRLKPESY

SEQ ID NO: 115 - protein, 214 aa, Homo sapiens
MGRRPARCYRYCKNKPYPKSRFCRGVPDAKIRIFDLGRKKAKVDEFPLCGHMVSDEYEQLSSEALEAARICANKYMVKSCGKDGFHIRVRLHPFHVIRINKMLSCAGADRLQTGMRGAFGKPQGTVARVHIGQVIMSIRTKLQNKEHVIEALRRAKFKFPGRQKIHISKKWGFTKFNADEFEDMVAEKRLIPDGCGVKYIPNRGPLDKWRALHS

SEQ ID NO: 116 - protein, 69 aa, Homo sapiens [sequence omitted]

SEQ ID NO: 117 - protein, 263 aa, Homo sapiens [sequence omitted]

SEQ ID NO: 118 - protein, 249 aa, Homo sapiens
MKLNISFPATGCQKLIEVDDERKLRTFYEKRMATEVAADALGEEWKGYVVRISGGNDKQGFPMKQGVLTHGRVRLLLSKGHSCYRPRRTGERKRKSVRGCIVDANLSVLNLVIVKKGEKDIPGLTDTTVPRRLGPKRASRIRKLFNLSKEDDVRQYVVRKPLNKEGKKPRTKAPKIQRLVTPRVLQHKRRRIALKKQRTKKNKEEAAEYAKLLAKRMKEAKEKRQEQIAKRRRLSSLRASTSKSESSQK

SEQ ID NO: 119 - protein, 1292 aa, Homo sapiens
MSSECDGGSKAVMNGLAPGSNGQDKATADPLRARSISAVKIIPVKTVKNASGLVLPTDMDLTKICTGKGAVTLRASSSYRETPSSSPASPQETRQHESKPGLEPEPSSADEWRLSSSADANGNAQPSSLAAKGYRSVHPNLPSDKSQDATSSSAAQPEVIVVPLYLVNTDRGQEGTARPPTPLGPLGCVPTIPATASAASPLTFPTLDDFIPPHLQRWPHHSQPARASGSFAPISQTPPSFSPPPPLVPPAPEDLRRVSEPDLTGAVSSTDSSPLLNEVSSSLIGTDSQAFPSVSKPSSAYPSTTIVNPTIVLLQHNREQQKRLSSLSDPVSERRVGEQDSAPTQEKPTSPGKAIEKRAKDDSRRVVKSTQDLSDVSMDEVGIPLRNTERSKDWYKTMFKQIHKLNRDTPEENPYFPTYKFPELPEIQQTSEEDNPYTPTYQFPASTPSPKSEDDDSDLYSPRYSFSEDTKSPLSVPRSKSEMSYIDGEKVVKRSATLPLPARSSSLKSSSERNDWEPPDKKVDTRKYRAEPKSIYEYQPGKSSVLTNEKMSRDISPEEIDLKNEPWYKFFSELEFGKPPPKKIWDYTPGDCSILPREDRKTNLDKDLSLCQTELEADLEKMETLNKAPSANVPQSSAISPTPEISSETPGYIYSSNFHAVKRESDGAPGDLTSLENERQIYKSVLEGGDIPLQGLSGLKRPSSSASTKDSESPRHFIPADYLESTEEFIRRRHDDKEKLLADQRRLKREQEEADIAARRHTGVIPTHHQFITNERFGDLLNIDDTAKRKSGSEMRPARAKFDFKAQTLKELPLQKGDIVYIYKQIDQNWYEGEHHGRVGIFPRTYIELLPPAEKAQPKKLTPVQVLEYGEAIAKFNFNGDTQVEMSFRKGERITLLRQVDENWYEGRIPGTSRQGIFPITYVDVIKRPLVKNPVDYMDLPFSSSPSRSATASPQFSSHSKLITPAPSSLPHSRRALSPEMHAVTSEWISLTVGVPGRRSLALTPPLPPLPEASIYNTDHLALSPRASPSLSLSLPHLSWSDRPTPRSVASPLALPSPHKTYSLAPTSQASLHMNGDGGVHTPSSGIHQDSFLQLPLGSSDSVISQLSDAFSSQSKRQPWREESGQYERKAERGAGERGPGGPKISKKSCLKPSDVVRCLSTEQRLSDLNTPEESRPGKPLGSAFPGSEAEQTERHRGGEQAGRKAARRGGSQQPQAQQRRVTPDRSQTSQDLFSYQALYSYIPQNDDELELRDGDIVDVMEKCDDGWFVGTSRRTKQFGTFPGNYVKPLYL

SEQ ID NO: 120 - protein, 567 aa, Homo sapiens
MSASTGGGGDSGGSGGSSSSSQASCGPESSGSELALATPVPQMLQGLLGSDDEEQEDPKDYCKGGYHPVKIGDVFNGRYHVVRKLGWGHFSTVWLCWDIQRKRFVALKVVKSAGHYTETAVDEIKLLKCVRDSDPSDPKRETIVQLIDDFRISGVNGVHVCMVLEVLGHQLLKWIIKSNYQGLPVPCVKSIVRQVLHGLDYLHTKCKIIHTDIKPENILLCVGDAYIRRLAAEATEWQQAGAPPPSRSIVSTAPQEVLQTGKLSKNKRKKMRRKRKQQKRLLEERLRDLQRLEAMEAATQAEDSGLRLDGGSGSTSSSGCHPGGARAGPSPASSSPAPGGGRSLSAGSQTSGFSGSLFSPASCSILSGSSNQRETGGLLSPSTPFGASNLLVNPLEPQNADKIKIKIADLGNACWVHKHFTEDIQTRQYRAVEVLIGAEYGPPADIWSTACMAFELATGDYLFEPHSGEDYSRDEDHIAHIVELLGDIPPAFALSGRYSREFFNRRGELRHIHNLKHWGLYEVLMEKYEWPLEQATQFSAFLLPMMEYIPEKRASAADCLQHPWLNP

SEQ ID NO: 121 - protein, 128 aa, Homo sapiens [sequence omitted]

SEQ ID NO: 122 - protein, 394 aa, Homo sapiens
AAGACAGAGGTCCTCTTTCCTTGCCTAATGCAGCCATGGCTCGTGGTCCCAAGAAGCATCTGAAGCAGGTAGCAGCTCCAAAGCATTGGATGCTGAATAAATTGACTGGTGTGTTTGCTCCTCATCCATCCACCAGTCCCCACAATTTGAGAGAGTGTCTCCCCCTCATCATTTTCCTAAGGAACAGACTTAAGTATGTCCTCACTGGAAATGAAGTAAAGAAGATTTGCATGCAGCGGTTCATTAAGATCAATGGCAAGGTCCGTACTGATATAACCTACTCTGCTGGATTCATGGATGTCAACAGCATTGACAAGTCGGGAGAGAATTTCCGTCTGATCTATGACACCAAGGGTCGCTTTGCTGTACATCGTATTACACCTGAGGAGGCCAA

SEQ ID NO: 123 - protein, 185 aa, Homo sapiens
MKLVSVALMYLGSLAFLGADTARLDVASEFRKKWNKWALSRGKRELRMSSSYPTGLADVKAGPAQTLIRPQDMKGASRSPEDSSPDAARIRVKRYRQSMNNFQGLRSFGCRFGTCTVQKLAHQIYQFTDKDKDNVAPRSKISPQGYGRRRRRSLPEAGPGRTLVSSKPQAHGAPAPPSGSAPHFL

SEQ ID NO: 124 - protein, 349 aa, Homo sapiens
MAAEEEEVDSADTGERSGWLTGWLPTWCPTSISHLKEAEEKMLKCVPCTYKKEPVRISNGNKIWTLKFSHNISNKTPLVLLHGFGGGLGLWALNFGDLCTNRPVYAFDLLGFGRSSRPRFDSDAEEVENQFVESIEEWRCALGLDKMILLGHNLGGFLAAAYSLKYPSRVNHLILVEPWGFPERPDLADQDRPIPVWIRALGAALTPFNPLAGLRIAGPFGLSLVQRLRPDFKRKYSSMFEDDTVTEYIYHCNVQTPSGETAFKNMTIPYGWAKRPMLQRIGKMHPDIPVSVIFGARSCIDGNSGTSIQSLRPHSYVKTIAILGAGHYVYADQPEEFNQKVKEICDTVD

SEQ ID NO: 125 - protein, 956 aa, Homo sapiens
MLEELECGAPGARGAATAMDCKDRPAFPVKKLIQARLPFKRLNLVPKGKADDMSDDQGTSVQSKSPDLEASLDTLENNCHVGSDIDFRPKLVNGKGPLDNFLRNRIETSIGQSTVIIDLTEDSNEQPDSLVDHNKLNSEASPSREAINGQREDTGDQQGLLKAIQNDKLAFPGETLSDIPCKTEEEGVGCGGAGRRGDSQECSPRSCPELTSGPRMCPRKEQDSWSEAGGILFKGKVPMVVLQDILAVRPPQIKSLPATPQGKNMTPESEVLESFPEEDSVLSHSSLSSPSSTSSPEGPPAPPKQHSSTSPFPTSTPLRRITKKFVKGSTEKNKLRLQRDQERLGKQLKLRAEREEKEKLKEEAKRAKEEAKKKKEEEKELKEKERREKREKDEKEKAEKQRLKEERRKERQEALEAKLEEKRKKEEEKRLREEEKRIKAEKAEITRFFQKPKTPQAPKTLAGSCGKFAPFEIKEHMVLAPRRRTAFHPDLCSQLDQLLQQQSGEFSFLKDLKGRQPLRSGPTHVSTRNADIFNSDVVIVERGKGDGVPERRKFGRMKLLQFCENHRPAYWGTWNKKTALIRARDPWAQDTKLLDYEVDSDEEWEEEEPGESLSHSEGDDDDDMGEDEDEDDGFFVPHGYLSEDEGVTEECADPENHKVRQKLKAKEWDEFLAKGKRFRVLQPVKIGCVWAADRDCAGDDLKVLQQFAACFLETLPAQEEQTPKASKRERRDEQILAQLLPLLHGNVNGSKVIIREFQEHCRRGLLSNHTGSPRSPSTTYLHTPTPSEDAAIPSKSRLKRLISENSVYEKRPDFRMCWYVHPQVLQSFQQEHLPVPCQWSYVTSVPSAPKEDSGSVPSTGPSQGTPISLKRKSAGSMCITQFMKKRRHDGQIGAEDMDGFQADTEEEEEEEGDCMIVDVPDAAEVQAPCGAASGAGGGVGVDTGKATLTSSPLGAS

SEQ ID NO: 126 - protein, 218 aa, Homo sapiens
MAMFEQMRANVGKLLKGIDRYNPENLATLERYVETQAKENAYDLEANLAVLKLYQFNPAFFQTTVTAQILLKALTNLPHTDFTLCKCMIDQAHQEERPIRQILYLGDLLETCHFQAFWQALDENMDLLEGITGFEDSVRKFICHVVGITYQHIDRWLLAEMLGDLSDSQLKVWMSKYGWSADESGQIFICSQEESIKPKNIVEKIDFDSVSSIMASSQ

SEQ ID NO: 127 - protein, 611 aa, Homo sapiens
MAASAKKKNKKGKTISLTDFLAEDGGTGGGSTYVSKPVSWADETDDLEGDVSTTWHSNDDDVYRAPPIDRSILPTAPRAAREPNIDRSRLPKSPPYTAFLGNLPYDVTEESIKEFFRGLNISAVRLPREPSNPERLKGFGYAEFEDLDSLLSALSLNEESLGNRRIRVDVADQAQDKDRDDRSFGRDRNRDSDKTDTDWRARPATDSFDDYPPRRGDDSFGDKYRDRYDSDRYRDGYRDGYRDGPRRDMDRYGGRDRYDDRGSRDYDRGYDSRIGSGRRAFGSGYRRDDDYRGGGDRYEDRYDRRDDRSWSSRDDYSRDDYRRDDRGPPQRPKLNLKPRSTPKEDDSSASTSQSTRAASIFGGAKPVDTAAREREVEERLQKEQEKLQRQLDEPKLERRPRERHPSWRSEETQERERSRTGSESSQTGTSTTSSRNARRRESEKSLENETLNKEEDCHSPTSKPPKPDQPLKVMPAPPPKENAWVKRSSNPPARSQSSDTEQQSPTSGGGKVAPAQPSEEGPGRKDENKVDGMNAPKGQTGNSSRGPGDGGNRDHWKESDRKDGKKDQDSRSAPEPKKPEENPASKFSSASKYAALSVDGEDENEGEDYAE

SEQ ID NO: 128 - protein, 291 aa, Homo sapiens [sequence omitted]

SEQ ID NO: 129 - protein, 317 aa, Homo sapiens [sequence omitted]

SEQ ID NO: 130 - protein, 3333 aa, Homo sapiens
MAAAARPRGRALGPVLPPTPLLLLVLRVLPACGATARDPGAAAGLSLHPTYFNLAEAARIWATATCGERGPGEGRPQPELYCKLVGGPTAPGSGHTIQGQFCDYCNSEDPRKAHPVTNAIDGSERWWQSPPLSSGTQYNRVNLTLDLGQLFHVAYILIKFANSPRPDLWVLERSVDFGSTYSPWQYFAHSKVDCLKEFGREANMAVTRDDDVLCVTEYSRIVPLENGEVVVSLINGRPGAKNFTFSHTLREFTKATNIRLRFLRTNTLLGHLISKAQRDPTVTRRYYYSIKDISIGGQCVCNGHAEVCNINNPEKLFRCECQHHTCGETCDRCCTGYNQRRWRPAAWEQSHECEACNCHGHASNCYYDPDVERQQASLNTQGIYAGGGVCINCQHNTAGVNCEQCAKGYYRPYGVPVDAPDGCIPCSCDPEHADGCEQGSGRCHCKPNFHGDNCEKCAIGYYNFPFCLRIPIFPVSTPSSEDPVAGDIKGCDCNLEGVLPEICDAHGRCLCRPGVEGPRCDTCRSGFYSFPICQACWCSALGSYQMPCSSVTGQCECRPGVTGQRCDRCLSGAYDFPHCQGSSSACDPAGTINSNLGYCQCKLHVEGPTCSRCKLLYWNLDKENPSGCSECKCHKAGTVSGTGECRQGDGDCHCKSHVGGDSCDTCEDGYFALEKSNYFGCQGCQCDIGGALSSMCSGPSGVCQCREHVVGKVCQRPENNYYFPDLHHMKYEIEDGSTPNGRDLRFGFDPLAFPEFSWRGYAQMTSVQNDVRITLNVGKSSGSLFRVILRYVNPGTEAVSGHITIYPSWGAAQSKEIIFLPSKEPAFVTVPGNGFADPFSITPGIWVACIKAEGVLLDYLVLLPRDYYEASVLQLPVTEPCAYAGPPQENCLLYQHLPVTRFPCTLACEARHFLLDGEPRPVAVRQPTPAHPVMVDLSGREVELHLRLRIPQVGHYVVVVEYSTEAAQLFVVDVNVKSSGSVLAGQVNIYSCNYSVLCRSAVIDHMSRIAMYELLADADIQLKGHMARFLLHQVCIIPIEEFSAEYVRPQVHCIASYGRFVNQSATCVSLAHETPPTALILDVLSGRPFPHLPQQSSPSVDVLPGVTLKAPQNQVTLRGRVPHLGRYVFVIHFYQAAHPTFPAQVSVDGGWPRAGSFHASFCPHVLGCRDQVIAEGQIEFDISEPEVAATVKVPEGKSLVLVRVLVVPAENYDYQILHKKSMDKSLEFITNCGKNSFYLDPQTASRFCKNSARSLVAFYHKGALPCECHPTGATGPHCSPEGGQCPCQPNVIGRQCTRCATGHYGFPRCKPCSCGRRLCEEMTGQCRCPPRTVRPQCEVCETHSFSFHPMAGCEGCNCSRRGTIEAAMPECDRDSGQCRCKPRITGRQCDRCASGFYRFPECVPCNCNRDGTEPGVCDPGTGACLCKENVEGTECNVCREGSFHLDPANLKGCTSCFCFGVNNQCHSSHKRRTKFVDMLGWHLETADRVDIPVSFNPGSNSMVADLQELPATIHSASWVAPTSYLGDKVSSYGGYLTYQAKSFGLPGDMVLLEKKPDVQLTGQHMSIIYEETNTPRPDRLHHGRVHVVEGNFRHASSRAPVSREELMTVLSRLADVRIQGLYFTETQRLTLSEVGLEEASDTGSGRIALAVEICACPPAYAGDSCQGCSPGYYRDHKGLYTGRCVPCNCNGHSNQCQDGSGICVNCQHNTAGEHCERCQEGYYGNAVHGSCRACPCPHTNSFATGCVVNGGDVRCSCKAGYTGTQCERCAPGYFGNPQKFGGSCQPCSCNSNGQLGSCHPLTGDCINQEPKDSSPAEECDDCDSCVMTLLNDLATMGEQLRLVKSQLQGLSASAGLLEQMRHMETQAKDLRNQLLNYRSAISNHGSKIEGLERELTDLNQEFETLQEKAQVNSRKAQTLNNNVNRATQSAKELDVKIKNVIRNVHILLKQISGTDGEGNNVPSGDFSREWAEAQRMMRELRNRNFGKHLREAEADKRESQLLLNRIRTWQKTHQGENNGLANSIRDSLNEYEAKLSDLRARLQEAAAQAKQANGLNQENERALGAIQRQVKEINSLQSDFTKYLTTADSSLLQTNIALQLMEKSQKEYEKLAASLNEARQELSDKVRELSRSAGKTSLVEEAEKHARSLQELAKQLEEIKRNASGDELVRCAVDAATAYENILNAIKAAEDAANRAASASESALQTVIKEDLPRKAKTLSSNSDKLLNEAKMTQKKLKQEVSPALNNLQQTLNIVTVQKEVIDTNLTTLRDGLHGIQRGDIDAMISSAKSMVRKANDITDEVLDGLNPIQTDVERIKDTYGRTQNEDFKKALTDADNSVNKLTNKLPDLWRKIESINQQLLPLGNISDNMDRIRELIQQARDAASKVAVPMRFNGKSGVEVRLPNDLEDLKGYTSLSLFLQRPNSRENGGTENMFVMYLGNKDASRDYIGMAVVDGQLTCVYNLGDREAELQVDQILTKSETKEAVMDRVKFQRIYQFARLNYTKGATSSKPETPGVYDMDGRNSNTLLNLDPENVVFYVGGYPPDFKLPSRLSFPPYKGCIELDDLNENVLSLYNFKKTFNLNTTEVEPCRRRKEESDKNYFEGTGYARVPTQPHAPIPTFGQTIQTTVDRGLLFFAENGDRFISLNIEDGKLMVRYKLNSELPKERGVGDAINNGRDHSIQIKIGKLQKRMWINVDVQNTIIDGEVFDFSTYYLGGIPIAIRERFNISTPAFRGCMKNLKKTSGVVRLNDTVGVTKKCSEDWKLVRSASFSRGGQLSFTDLGLPPTDHLQASFGFQTFQPSGILLDHQTWTRNLQVTLEDGYIELSTSDSGSPIFKSPQTYMDGLLHYVSVISDNSGLRLLIDDQLLRNSKRLKHISSSRQSLRLGGSNFEGCISNVFVQRLSLSPEVLDLTSNSLKRDVSLGGCSLNKPPFLMLLKGSTRFNKTKTFRINQLLQDTPVASPRSVKVWQDACSPLPKTQANHGALQFGDIPTSHLLFKLPQELLKPRSQFAVDMQTTSSRGLVFHTGTKNSFMALYLSKGRLVFALGTDGKKLRIKSKEKCNDGKWHTVVFGHDGEKGRLVVDGLRAREGSLPGNSTISIRAPVYLGSPPSGKPKSLPTNSFVGCLKNFQLDSKPLYTPSSSFGVSSCLGGPLEKGIYFSEEGGHVVLAHSVLLGPEFKLVFSIRPRSLTGILIHIGSQPGKHLCVYLEAGKVTASMDSGAGGTSTSVTPKQSLCDGQWHSVAVTIKQHILHLELDTDSSYTAGQIPFPPASTQEPLHLGGAPANLTTLRIPVWKSFFGCLRNIHVNHIPVPVTEALEVQGPVSLNGCPDQ

SEQ ID NO: 131 - protein, 76 aa, Homo sapiens
MAPSALLRPLSRLLAPARLPSGPSVRSKFYVREPPNAKPDWLKVGFTLGTTVFLWIYLIKQHNEDILEYKRRNGLE

SEQ ID NO: 132 - protein, 577 aa, Homo sapiens
MSQVQVQVQNPSAALSGSQILNKNQSLLSQPLMSIPSTTSSLPSENAGRPIQNSALPSASITSTSAAAESITPTVELNALCMKLGKKPMYKPVDPYSRMQSTYNYNMRGGAYPPRYFYPFPVPPLLYQVELSVGGQQFNGKGKTRQAAKHDAAAKALRILQNEPLPERLEVNGRESEEENLNKSEISQVFEIALKRNLPVNFEVARESGPPHMKNFVTKVSVGEFVGEGEGKSKKISKKNAAIAVLEELKKLPPLPAVERVKPRIKKKTKPIVKPQTSPEYGQGINPISRLAQIQQAKKEKEPEYTLLTERGLPRRREFVMQVKVGNHTAEGTGTNKKVAKRNAAENMLEILGFKVPQAQPTKPALKSEEKTPIKKPGDGRKVTFFEPGSGDENGTSNKEDEFRMPYLSHQQLPAGILPMVPEVAQAVGVSQGHHTKDFTRAAPNPAKATVTAMIARELLYGGTSPTAETILKNNISSGHVPHGPLTRPSEQLDYLSRVQGFQVEYKDFPKNNKNEFVSLINCSSQPPLISHGIGKDVESCHDMAALNILKLLSELDQQSTEMPRTGNGPMSVCGRC

SEQ ID NO: 133 - protein, 623 aa, Homo sapiens
MATEHVNGNGTEEPMDTTSAVIHSENFQTLLDAGLPQKVAEKLDEIYVAGLVAHSDLDERAIEALKEFNEDGALAVLQQFKDSDLSHVQNKSAFLCGVMKTYRQREKQGTKVADSSKGPDEAKIKALLERTGYTLDVTTGQRKYGGPPPDSVYSGQQPSVGTEIFVGKIPRDLFEDELVPLFEKAGPIWDLRLMMDPLTGLNRGYAFVTFCTKEAAQEAVKLYNNHEIRSGKHIGVCISVANNRLFVGSIPKSKTKEQILEEFSKVTEGLTDVILYHQPDDKKKNRGFCFLEYEDHKTAAQARRRLMSGKVKVWGNVGTVEWADPIEDPDPEVMAKVKVLFVRNLANTVTEEILEKAFSQFGKLERVKKLKDYAFIHFDERDGAVKAMEEMNGKDLEGENIEIVFAKPPDQKRKERKAQRQAAKNQMYDDYYYYGPPHMPPPTRGRGRGGRGGYGYPPDYYGYEDYYDYYGYDYHNYRGGYEDPYYGYEDFQVGARGRGGRGARGAAPSRGRGAAPPRGRAGYSQRGGPGSARGVRGARGGAQQQRGRGVRGARGGRGGNVGGKRKADGYNQPDSKRRQTNNQNWGSQPIAQQPLQGGDHSGNYGYKSENQEFYQDTFGQQWK
